(19) United States
(12) Patent Application Publication
(10) Pub. No.: US 2004/0214167 A9
(43) Pub. Date: Oct. 28, 2004

(54) NF-kappa B activating gene

(76) Inventors: Akio Matsuda, Fuji-shi (JP); Goichi Honda, Shizuoka (JP); Shuji Muramatsu, Shizuoka (JP); Yukiko Nagano, Shizuoka (JP)

Correspondence Address: BIRCH STEWART KOLASCH & BIRCH, PO BOX 747, FALLS CHURCH, VA, 22040-0747, US

(21) Appl. No.: 10/024,298

(22) Filed: Dec. 21, 2001

Related U.S. Application Data
(60) Provisional application No. 60/258,315, filed on Dec. 28, 2000.
(60) Provisional application No. 60/278,640, filed on Mar. 26, 2001.
(60) Provisional application No. 60/314,385, filed on Aug. 24, 2001.

(51) Int. Cl. C12Q 1/68

(52) U.S. Cl. 435/6

(57) ABSTRACT

Provided are proteins having NF-κB activity, which are used for diagnosing, treating or preventing diseases associated with the excessive activation or inhibition of NF-κB. Using plasmid pNFκB-Luc, cDNA encoding a protein capable of activating NF-κB has been cloned from a cDNA library constructed from human lung fibroblasts, and the DNA sequence and the deduced amino acid sequence determined. The protein, the DNA encoding the protein, a recombinant vector containing the DNA, and a transformant containing the recombinant vector are useful for screening a substance inhibiting or promoting NF-κB activation.

[0001] This application claims priority on provisional Application Nos. 60/258,315; 60/278,640 and 60/314,385 filed on Dec. 28, 2000; Mar. 26, 2001; Aug. 24, 2001, the entire contents of which are hereby incorporated by reference.

### TECHNICAL FIELD

[0002] The present invention relates to a protein capable of activating NF-κB, a DNA sequence encoding the protein, a method for obtaining the DNA, a recombinant vector containing the DNA, a transformant containing the recombinant vector, and an antibody which specifically reacts with the protein. The present invention also relates to use of the protein, DNA molecule or antibody of the invention in the diagnosis, treatment or prevention of diseases associated with the excessive activation or inhibition of NF-κB.

[0003] The present invention also relates to a method for screening a substance capable of inhibiting or promoting NF-κB activation by using the protein, DNA, recombinant vector and transformant.

### BACKGROUND ART

[0004] The transcription factor NF-κB (nuclear factor kappa B) plays an important role in the transcriptional regulation of various genes involved in inflammation and immunological reactions. NF-κB is a homo- or heterodimer protein which belongs to the Rel family. In unstimulated conditions, NF-κB normally resides in the cytoplasm as an inactive form by forming a complex with an IκB inhibitory protein (Inhibitor of NF-κB) to mask the nuclear transport signal of NF-κB.

[0005] When cytokines such as interleukin (IL)-1 and tumor necrosis factor (TNF)-α stimulate cells, IκB is phosphorylated by IKK (IκB kinase) and degraded by the 26S proteasome through ubiquitination. The released NF-κB moves to the nucleus, where it binds to the DNA sequence called the NF-κB binding sequence and induces the transcription of the gene, which is under control of NF-κB is believed to regulate the expression of genes such as those for immunoglobulins, inflammatory cytokines (e.g., IL-1 and TNF-α), interferons and cell adhesion factors. NF-κB is involved in inflammation and immune responses through the expression induction of these genes.

[0006] The inhibition of the function or activation of NF-κB may inhibit the expression of many factors (proteins) involved in inflammatory or immunological diseases or other diseases such as tumor proliferation. Thus, NF-κB is a promising target for medicaments against diseases caused or characterized by autoimmunity or inflammation [see e.g., Clinical Chemistry 45, 7-17 (1999); J Clin. Pharmacol. 38, 981-993 (1998); Gut 43, 856-860 (1998); The New England Journal of Medicine 366, 1066-1071 (1997); TiPS 46-50 (1997); The FASEB Journal 9, 899-909 (1995); Nature 395, 225-226 (1998); Science 278, 818-819 (1997); Cell 91, 299-302 (1997)].

[0007] Extracellular information is converted into a certain signal, which passes through the cell membrane and goes through the cytoplasm to the nucleus, where it regulates the expression of the target gene and causes cell responses. Therefore the elucidation of the mechanism of intracellular signal transduction from extracellular stimuli to NF-κB activation is of very important significance, because it provides very important means of developing new medicaments or therapies against autoimmune diseases and diseases exhibiting inflammatory symptoms.

[0008] It is believed that the signal transduction pathway from certain cell stimulation to NF-κB activation includes many steps mediated by various transmitters such as protein kinases. Therefore it is desirable for more efficient drug discovery to identify the transmitters which play a key role in the pathway, and to focus research on the transmitters to establish a new drug-screening method. Some signaling molecules involved in NF-κB activation have been identified [e.g., IKK, ubiquitination enzymes and the 26S proteasome described above, as well as TNF receptor associated factor 2 (TRAF2) and NF-κB inducing kinase (NIK)]. However, most of the mechanism of NF-κB activation remains unknown, and it has been desired new signaling molecules to be identified and further the NF-κB activation mechanism to be elucidated.

### DISCLOSURE OF THE INVENTION

[0009] The object of the present invention is to identify a new gene and protein capable of directly, or indirectly, activating NF-K, B, and to provide a method of use of them in medicaments, diagnostics and therapy. That is, the present invention provides a new protein capable of activating NF-κB, a DNA sequence encoding the protein, a recombinant vector containing the DNA, a transformant containing the recombinant vector, a process for producing the protein, an antibody directed against the protein or a peptide fragment thereof, and a process for producing the antibody.

[0010] The present invention also provides a method for screening a substance capable of inhibiting or promoting NF-κB activation, a kit for the screening, a substance capable of inhibiting or promoting NF-κB activation obtainable by the screening method or the screening kit, a process for producing the substance, a pharmaceutical composition containing a substance capable of inhibiting or promoting NF-κB activation, etc.

[0011] Recently, random analysis of cDNA molecules has been intensively carried out to analyze various genes, which are expressed in vivo. The cDNA fragments thus obtained have been entered for databases and published as ESTs (Expressed Sequence Tags, e.g., http//www.ncbi.nlm.nih.gov/dbEST). However, ESTs are merely sequence information, and it is difficult to predict their functions. ESTs are also arranged in UniGene (http//www.ncbi.nlm.nih.gov/UniGene), and about 92,000 clusters have been registered until now. However, most of these ESTs have their 5′ end nucleotide sequences deleted, and contain no translation initiation site. Therefore it is unlikely that such analysis will directly lead to gene functional analysis such as the analysis of protein functions on the assumption of the determination of mRNA coding regions and the understanding of gene expression control by the analysis of promoters.

[0012] On the other hand, one method to elucidate functions of gene products (i.e., proteins) is transient expression cloning method using animal cells [see e.g., “Idenshi Kougaku Handbook (Genetic Engineering Handbook)”, an extra issue of “Jikken Igaku (Experimental Medicine)”, YODOSHA CO., LTD.]. This method involves transfecting animal cells with a cDNA library constructed using an animal cell expression vector to directly express a functional protein, and identifying and cloning the cDNA based on the biological activity of the protein having an effect on the cells. This method requires no chemical information (amino acid sequences and molecular weights) regarding the target protein product as a prerequisite, and allows the identification of cDNA clones by detecting specific biological activity of the protein expressed in the cells or culture.

[0013] For the efficient expression cloning, there is a need to devise a method of preparing a cDNA library. Several methods have been widely used to construct cDNA libraries [e.g., the method of Gubbler-Hoffman: Gene 25 (1983); and the method of Okayama-Berg: Mol. Cell. Biol. 2 (1982)]. However, most of the cDNA molecules prepared by these methods have their 5′ end nucleotide sequences deleted, and thus these methods rarely produce full-length cDNA, a complete DNA copy of mRNA. This is because the reverse transcriptase used to prepare cDNA from mRNA does not necessarily have high efficiency in producing full-length cDNA. Therefore it is necessary to improve these prior art methods in order to efficiently carry out the above expression cloning.

[0014] In addition, in order to carry out the functional analysis of genes, it is essential to clone full-length cDNA sequences and express proteins from them. Therefore, it has been necessary to construct cDNA libraries containing enriched full-length cDNA for efficient expression cloning.

[0015] The present inventors have intensively studied to solve the above problems. As a result, the present inventors have succeeded in constructing a full-length cDNA library by using the oligo-capping method; establishing a gene function assay system by expression cloning using 293-EBNA cells; and isolating a new DNA (cDNA) encoding a protein having a function of activating NF-κB by using the assay system. This new DNA molecule induced NF-κB activation by its expression in 293-EBNA cells. This result shows that this new DNA is a signal transduction molecule involved in NF-κB activation. Thus, the present invention has been completed.

[0016] That is, the present invention relates to:

[0017] (1) A purified protein selected from the group consisting of:

[0018] (a) a protein that activates NF-κB which consists of an amino acid sequence represented by any one of SEQ ID NOS: 1, 3, 5, 7, 9, 11, 13, 15, 17, 19, 21, 23, 25, 27, 29, 31, 33, 35, 37, 39, 41, 43, 45, 47, 49, 51, 53, 55, 57, 59, 61, 63, 65, 67, 69, 71, 73, 75, 77, 79, 81, 83, 85, 87, 89, 91, 93, 95, 97, 99, 101, 103, 105, 107, 109, 111, 113, 115, 117, 119, 121, 123, 125, 127, 129, 131, 133, 135, 137, 139, 141, 143, 145, 147, 149, 152, 154, 156, 158, 160, 162, 164, 166, 168, 170, 172, 174, 176, 178, and 180; and

[0019] (b) a protein that activates NF-κB and consists of an amino acid sequence having at least one amino acid deletion, substitution or addition in an amino acid sequence represented by any one of SEQ ID NOS: 1, 3, 5, 7, 9, 11, 13, 15, 17, 19, 21, 23, 25, 27, 29, 31, 33, 35, 37, 39, 41, 43, 45, 47, 49, 51, 53, 55, 57, 59, 61, 63, 65, 67, 69, 71, 73, 75, 77, 79, 81, 83, 85, 87, 89,91, 93, 95, 97, 99, 101, 103, 105, 107, 109, 111, 113, 115, 117, 119, 121, 123, 125, 127, 129, 131, 133, 135, 137, 139, 141, 143, 145, 147, 149, 152, 154, 156, 158, 160, 162, 164, 166, 168, 170, 172, 174, 176, 178 and 180.

[0020] (2) A purified protein that activates NF-κB and comprises an amino acid sequence having at least 50% identity to the protein according to above item (1) over the entire length thereof.

[0021] (3) An isolated polynucleotide which comprises a nucleotide sequence encoding a protein selected from the group consisting of:

[0022] (a) a protein which comprises an amino acid sequence represented by any one of SEQ ID NOS: 1, 3, 5, 7, 9, 11, 13, 15, 17, 19, 21, 23, 25, 27, 29, 31, 33, 35, 37, 39, 41, 43, 45, 47, 49, 51, 53, 55, 57, 59, 61, 63, 65, 67, 69, 71, 73, 75, 77, 79, 81, 83, 85, 87, 89, 91, 93, 95, 97, 99, 101, 103, 105, 107, 109, 111, 113, 115, 117, 119, 121, 123, 125, 127, 129, 131, 133, 135, 137, 139, 141, 143, 145, 147, 149, 152, 154, 156, 158, 160, 162, 164, 166, 168, 170, 172, 174, 176, 178 and 180; and

[0023] (b) a protein that activates NF-κB and consists of an amino acid sequence having at least one amino acid deletion, substitution or addition in an amino acid sequence represented by any one of SEQ ID NOS: 1, 3, 5, 7, 9, 11, 13, 15, 17, 19, 21, 23, 25, 27, 29, 31, 33, 35, 37, 39, 41, 43, 45, 47, 49, 51, 53, 55, 57, 59, 61, 63, 65, 67, 69, 71, 73, 75, 77, 79, 81, 83, 85, 87, 89, 91, 93, 95, 97, 99, 101, 103, 105, 107, 109, 111, 113, 115, 117, 119, 121, 123, 125, 127, 129, 131, 133, 135, 137, 139, 141, 143, 145, 147, 149, 152, 154, 156, 158, 160, 162, 164, 166, 168, 170, 172, 174, 176, 178 and 180.

[0024] (4) An isolated polynucleotide comprising a polynucleotide sequence selected from the group consisting of:

[0025] (a) a polynucleotide sequence represented by any one of SEQ ID NOS: 2, 4, 6, 8, 10, 12, 14, 16, 18, 20, 22, 24, 26, 28, 30, 32, 34, 36, 38, 40, 42, 44, 46, 48, 50, 52, 54, 56, 58, 60, 62, 64, 66, 68, 70, 72, 74, 76, 78, 80, 82, 84, 86, 88, 90, 92, 94, 96, 98, 100, 102, 104, 106, 108, 110, 112, 114, 116, 118, 120, 122, 124, 126, 128, 130, 132, 134, 136, 138, 140, 142, 144, 146, 148, 150, 151, 153, 155, 157, 159, 161, 163, 165, 167, 169, 171, 173, 175, 177 and 179;

[0026] (b) a polynucleotide sequence encoding a protein that activates NF-κB and hybridizing under stringent conditions with a polynucleotide having a polynucleotide sequence complementary to the polynucleotide sequence of (a); and

[0027] (c) a polynucleotide sequence which encodes a protein that activates NF-κB and consists of a polynucleotide sequence having at least one nucleotide deletion, substitution or addition in a polynucleotide sequence represented by any one of SEQ ID NOS: 2, 4, 6, 8, 10, 12, 14, 16, 18, 20, 22, 24, 26, 28, 30, 32, 34, 36, 38, 40, 42, 44, 46, 48, 50, 52, 54, 56, 58, 60, 62, 64, 66, 68, 70, 72, 74, 76, 78, 80, 82, 84, 86, 88, 90, 92, 94, 96, 98, 100, 102, 104, 106, 108, 110, 112, 114, 116, 118, 120, 122, 124, 126, 128, 130, 132, 134, 136, 138, 140, 142, 144, 146, 148, 150, 151, 153, 155, 157, 159, 161, 163, 165, 167, 169, 171, 173, 175, 177 and 179.

[0028] (5) An isolated polynucleotide comprising a nucleotide sequence which encodes a protein that activates NF-κB and has at least 95% identity to the polynucleotide sequence according to above item (3) over the entire length thereof.

[0029] (6) An isolated polynucleotide comprising a nucleotide sequence which encodes a protein that activates NF-κB and has at least 95% identity to the polynucleotide sequence according to above item (4) over the entire length thereof.

[0030] (7) A purified protein encoded by the polynucleotide according to any one of above items (3) to (6).

[0031] (8) A recombinant vector which comprises a polynucleotide according to any one of above items (3) to (6).

[0032] (9) A transformed cell which comprises the recombinant vector according to above item (8).

[0033] (10) A membrane of the cell according to above item (9), when the protein according to above item (1) or (2) is a membrane protein.

[0034] (11) A process for producing a protein comprising,

[0035] (a) culturing a transformed cell comprising the isolated polynucleotide according to any one of items (3) to (6) under conditions providing expression of the encoded protein; and

[0036] (b) recovering the protein from the culture.

[0037] (12) A process for diagnosing a disease or a susceptibility to a disease in a subject related to expression or activity of the protein according to above item (1), (2) or (7) in a subject comprising:

[0038] (a) determining the presence or absence of a mutation in the nucleotide sequence encoding said protein in the genome of said subject; and/or

[0039] (b) analyzing the amount of expression of said protein in a sample derived from said subject. In the above-described method, a diagnosis of disease is preferably made when the amount of the protein expressed is 2-fold or higher than normal, or half or less than normal.

[0040] (13) A method for screening a compound in respect of activity to inhibit or promote NF-κB activation, which comprises the steps of:

[0041] (a) providing a cell with a gene encoding a protein that activates NF-κB, and a component that provides a detectable signal associated with activation of NF-κB;

[0042] (b) culturing a transformed cell under conditions, which permit the expression of the gene in the transformed cell;

[0043] (c) contacting the transformed cell with one or more compounds;

[0044] (d) measuring the detectable signal; and

[0045] (e) isolating or identifying an activator compound and/or an inhibitor compound by measuring the detectable signal.

[0046] Further, it is preferable to isolate or identify as an activator compound, a compound that increases said detectable signal 2-fold or higher than normal, and to isolate or identify as an inhibitor compound, a compound that decreases said detectable signal half or less than normal.

[0047] (14) A process for producing a pharmaceutical composition, which comprises the steps of:

[0048] (a) providing a cell with a gene encoding a protein that activates NF-κB, and a component capable of providing a detectable signal;

[0049] (b) culturing a transformed cell under conditions, which permit the expression of the gene in the transformed cell;

[0050] (c) contacting the transformed cell with one or more candidate compounds;

[0051] (d) measuring the detectable signal;

[0052] (e) isolating or identifying an activator compound and/or an inhibitor compound by measuring the detectable signal; and

[0053] (f) optimizing the isolated or identified compound as a pharmaceutical composition.

[0054] Further, it is preferable to isolate or identify as an activator compound, a compound that increases said detectable signal 2-fold or higher than normal, and to isolate or identify as an inhibitor compound, a compound that decreases said detectable signal half or less than normal.

[0055] (15) A kit for screening a compound in respect of activity to inhibit or promote NF-κB activation, which comprises:

[0056] (a) a cell comprising a gene encoding a protein that activates NF-κB, and a component that provides a detectable signal upon activation of NF-κB; and

[0057] (b) reagents for measuring the detectable signal.

[0058] (16) A monoclonal or polyclonal antibody that specifically binds to the protein according to above item (1), (2) or (7).

[0059] (17) A process for producing a monoclonal or polyclonal antibody according to above item that specifically binds to the protein of above item (1),(2) or (7), which comprises administering the protein according to above item (1), (2) or (7) as an antigen or epitope-bearing fragments to a non-human animal.

[0060] (18) An antisense oligonucleotide complementary to the polynucleotide according to any one of above items (3) to (6),which prevents NF-κB activator protein expression.

[0061] (19) A ribozyme which inhibits NF-κB activation by cleavage of RNA that encodes the protein of above item (1), (2) or (7).

[0062] (20) A method for treating a disease, which comprises administering to a subject an amount of a compound screened by the process according to above item (13), and/or a monoclonal or polyclonal antibody according to above item (16), and/or an antisense oligonucleotide according to above item (18), and/or a ribozyme according to above item (19) effective to treat a disease selected from the group consisting of inflammation, autoimmune diseases, infectious diseases, cancers and bone diseases.

[0063] (21) A pharmaceutical composition produced according to the process of item (14) as an inhibitor or promoter of NF-κB activation.

[0064] (22) A pharmaceutical composition according to item (21) for the treatment of inflammation, autoimmune diseases, cancers, infectious diseases, bone diseases, AIDS, neurodegenerative diseases, or ischemic disorders.

[0065] (23) A method of treating inflammation, autoimmune diseases, cancers, infectious diseases, bone diseases, AIDS, neurodegenerative diseases, or ischemic disorders, which comprises administering a pharmaceutical composition produced according to the process of above item (14) to a patient suffering from a disease associated with NF-κB.

[0066] (24) A pharmaceutical composition which comprises a monoclonal or polyclonal antibody according to item (16) as an active ingredient.

[0067] (25) A pharmaceutical composition which comprises an antisense oligonucleotide according to item (18) as an active ingredient.

[0068] (26) The pharmaceutical composition according to item (24) or (25), wherein the target disease is selected from the group consisting of inflammation, autoimmune diseases, infectious diseases, cancers, bone diseases, AIDS, neurodegenerative diseases and ischemic disorders.

[0069] (27) A method for obtaining a novel gene having a function, which comprises at least the following steps:

[0070] (a) constructing a full-length cDNA library by the oligo-capping method;

[0071] (b) cotransfecting the full-length cDNA and a plasmid containing a factor emitting a signal indicative of the presence of a protein having the function into cells; and

[0072] (c) selecting a plasmid emitting the signal.

[0073] It should be noted that a novel gene having a function according to the present invention refers to, for example, a nucleic acid molecule encoding a protein having biological function.

[0074] (28) A computer-readable medium on which a sequence data set has been stored, said sequence data set comprising at least one nucleotide sequence selected from the group consisting of SEQ ID NOS: 2, 4, 6, 8, 10, 12, 14, 16, 18, 20, 22, 24, 26, 28, 30, 32, 34, 36, 38, 40, 42, 44, 46, 48, 50, 52, 54, 56, 58, 60, 62, 64, 66, 68, 70, 72, 74, 76, 78, 80, 82, 84, 86, 88, 90, 92, 94, 96, 98, 100, 102, 104, 106, 108, 110, 112, 114, 116, 118, 120, 122, 124, 126, 128, 130, 132, 134, 136, 138, 140, 142, 144, 146, 148, 150, 151, 153, 155, 157, 159, 161, 163, 165, 167, 169, 171, 173, 175, 177 and 179, and/or at least one amino acid sequence selected from the group consisting of SEQ ID NOS: 1, 3, 5, 7, 9, 11, 13, 15, 17, 19, 21, 23, 25, 27, 29, 31, 33, 35, 37, 39, 41, 43, 45, 47, 49, 51, 53, 55, 57, 59, 61, 63, 65, 67, 69, 71, 73, 75, 77, 79, 81, 83, 85, 87, 89, 91, 93, 95, 97, 99, 101, 103, 105, 107, 109, 111, 113, 115, 117, 119, 121, 123, 125, 127, 129, 131, 133, 135, 137, 139, 141, 143, 145, 147, 149, 152, 154, 156, 158, 160, 162, 164, 166, 168, 170, 172, 174, 176, 178 and 180.

[0075] (29) A method for calculating identity to other nucleotide sequences and/or amino acid sequences, which comprises comparing data on a medium according to above item (28) with data of said other nucleotide sequences and/or amino acid sequences.

[0076] (30) An insoluble substrate to which polynucleotide comprising all or part of the nucleotide sequences selected from the group consisting of SEQ ID NOS: 2, 4, 6, 8, 10, 12, 14, 16, 18, 20, 22, 24, 26, 28, 30, 32, 34, 36, 38, 40, 42, 44, 46, 48, 50, 52, 54, 56, 58, 60, 62, 64, 66, 68, 70, 72, 74, 76, 78, 80, 82, 84, 86, 88 and 90, 92, 94, 96, 98, 100, 102, 104, 106, 108, 110, 112, 114, 116, 118, 120, 122, 124, 126, 128, 130, 132, 134, 136, 138, 140, 142, 144, 146, 148, 150, 151, 153, 155, 157, 159, 161, 163, 165, 167, 169, 171, 173, 175, 177 and 179, are fixed.

[0077] (31) An insoluble substrate to which polypeptides comprising all or a part of the amino acid sequences selected from the group consisting of SEQ ID NOS: 1, 3, 5, 7, 9, 11, 13, 15, 17, 19, 21, 23, 25, 27, 29, 31, 33, 35, 37, 39, 41, 43, 45, 47, 49, 51, 53, 55, 57, 59, 61, 63, 65, 67, 69, 71, 73, 75, 77, 79, 81, 83, 85, 87, 89, 91, 93, 95, 97, 99, 101, 103, 105, 107, 109, 111, 113, 115, 117, 119, 121, 123, 125, 127, 129, 131, 133, 135, 137, 139, 141, 143, 145, 147, 149, 152, 154, 156, 158, 160, 162, 164, 166, 168, 170, 172, 174, 176, 178 and 180, are fixed.

[0078] The contents of the specifications and/or drawings of Japanese Patent Applications Nos. 2000-402288, 2001-088912 and 2001-254018, and U.S. Provisional Applications Nos. 60/258,315, 60/278,640 and 60/314,385, which from the bases of priority of the instant application, are incorporated herein.

### BRIEF DESCRIPTION OF THE DRAWINGS

[0079] FIG. 1 is a graph showing NF-κB reporter activity inhibition by the proteasome inhibitor MG-132 (SEQ ID NO: 5) in Example 3, the axis of abscissa is MG-132 concentration and the transversal axis is relative luciferase activity where relative luciferase activity is taken as 100% under conditions of non-addition of MG-132 (0 μM). (Relative luciferase activity at various concentrations was divided by relative luciferase activity under conditions of non-addition of MG-132, and expressed as a percentage.).

[0080] FIG. 2 is a graph showing NF-κB reporter activity inhibition by the proteasome inhibitor MG-132 (SEQ ID NO: 9) in Example 3.

[0081] FIG. 3 is a graph showing NF-κB reporter activity inhibition by the proteasome inhibitor MG-132 (SEQ ID NO: 17) in Example 3.

[0082] FIG. 4 is a graph showing NF-κB reporter activity inhibition by the proteasome inhibitor MG-132 (SEQ ID NO: 21) in Example 3.

[0083] FIG. 5 is a graph showing NF-κB reporter activity inhibition by the proteasome inhibitor MG-132 (SEQ ID NO: 35) in Example 3.

[0084] FIG. 6 is a graph showing NF-κB reporter activity inhibition by the proteasome inhibitor MG-132 (SEQ ID NO: 37) in Example 3.

[0085] FIG. 7 is a graph showing NF-κB reporter activity inhibition by the proteasome inhibitor MG-132 (SEQ ID NO: 41) in Example 3.

[0086] FIG. 8 is a graph showing NF-κB reporter activity inhibition by the proteasome inhibitor MG-132 (SEQ ID NO: 53) in Example 3.

[0087] FIG. 9 is a graph showing NF-κB reporter activity inhibition by the proteasome inhibitor MG-132 (SEQ ID NO: 57) in Example 3.

[0088] FIG. 10 is a graph showing NF-κB reporter activity inhibition by the proteasome inhibitor MG-132 (SEQ ID NO: 63) in Example 3.

[0089] FIG. 11 is a graph showing NF-κB reporter activity inhibition by the proteasome inhibitor MG-132 (SEQ ID NO: 67) in Example 3.

[0090] FIG. 12 is a graph showing NF-κB reporter activity inhibition by the proteasome inhibitor MG-132 (SEQ ID NO: 71) in Example 3.

[0091] FIG. 13 is a graph showing NF-κB reporter activity inhibition by the proteasome inhibitor MG-132 (SEQ ID NO: 75) in Example 3.

[0092] FIG. 14 is a graph showing NF-κB reporter activity inhibition by the proteasome inhibitor MG-132 (SEQ ID NO: 81) in Example 3.

[0093] FIG. 15 is a graph showing NF-κB reporter activity inhibition by the proteasome inhibitor MG-132 (SEQ ID NO: 87) in Example 3.

[0094] FIG. 16 is a graph showing NF-κB reporter activity inhibition by the proteasome inhibitor MG-132 (SEQ ID NO: 91) in Example 3.

[0095] FIG. 17 is a graph showing NF-κB reporter activity inhibition by the proteasome inhibitor MG-132 (SEQ ID NO: 93) in Example 3.

[0096] FIG. 18 is a graph showing NF-κB reporter activity inhibition by the proteasome inhibitor MG-132 (SEQ ID NO: 97) in Example 3.

[0097] FIG. 19 is a graph showing NF-κB reporter activity inhibition by the proteasome inhibitor MG-132 (SEQ ID NO: 121) in Example 3.

[0098] FIG. 20 is a graph showing NF-κB reporter activity inhibition by the proteasome inhibitor MG-132 (SEQ ID NO: 123) in Example 3.

[0099] FIG. 21 is a graph showing NF-κB reporter activity inhibition by the proteasome inhibitor MG-132 (SEQ ID NO: 129) in Example 3.

[0100] FIG. 22 is a graph showing NF-κB reporter activity inhibition by the proteasome inhibitor MG-132 (SEQ ID NO: 154) in Example 3.

[0101] FIG. 23 is a graph showing NF-κB reporter activity inhibition by the proteasome inhibitor MG-132 (SEQ ID NO: 158) in Example 3.

[0102] FIG. 24 is a graph showing NF-κB reporter activity inhibition by the proteasome inhibitor MG-132 (SEQ ID NO: 162) in Example 3.

[0103] FIG. 25 is a graph showing NF-κB reporter activity inhibition by the proteasome inhibitor MG-132 (SEQ ID NO: 168) in Example 3.

[0104] FIG. 26 is a graph showing NF-κB reporter activity inhibition by the proteasome inhibitor MG-132 (SEQ ID NO: 170) in Example 3.

[0105] FIG. 27 is a graph showing NF-κB reporter activity inhibition by the proteasome inhibitor MG-132 (SEQ ID NO: 172) in Example 3.

[0106] FIG. 28 is a graph showing NF-κB reporter activity inhibition by the proteasome inhibitor MG-132 (SEQ ID NO: 176) in Example 3.

[0107] FIG. 29 is a graph showing NF-κB reporter activity inhibition by the proteasome inhibitor MG-132 (SEQ ID NO: 178) in Example 3.

### EXPLANATION OF THE SEQUENCE LISTING

[0108] SEQ ID NO: 181 is a primer.

[0109] SEQ ID NO: 182 is a primer.

### BEST MODE FOR CARRYING OUT THE INVENTION

[0110] At first, in order to further clarify the basic feature of the present invention, the present invention is explained by following how the present invention is completed. In order to obtain a new gene having a function of activating NF-κB, the following experiments were carried out as shown in the examples. First, using the oligo-capping method, a full-length cDNA was produced from mRNA prepared from normal human lung fibroblasts (purchased from Sanko Junyaku Co., Ltd.), and a full-length cDNA library was constructed in which the cDNA was inserted into the vector pME18S-FL3 (GenBank Accession AB009864). Next, the cDNA library was introduced into E. coli cells, and plasmid preparation was carried out per clone. Then, the pNKκB-Luc reporter plasmid (STRATAGENE) containing a DNA encoding luciferase under control of a promoter activated by NF-κB and the above full-length cDNA plasmid were cotransfected into 293-EBNA cells (Invitrogen). After 24 or 48 hours of culture, luciferase activity was measured, and the plasmid with significantly increased luciferase activity compared to that of a control experiment (vector pME 18S-FL3 is introduced into a cell in place of a full-length cDNA) was selected (the selected plasmid showed a 5-fold or more increase in luciferase activity compared to that of the control experiment), and the entire nucleotide sequence of the cDNA cloned into the plasmid was determined. The protein encoded by the cDNA thus obtained shows that this protein is a signal transduction molecule involved in NF-κB activation.

[0111] The present invention is described in detail below.

[0112] In the present invention, activation of NF-κB refers to direct or indirect activation of NF-κB (including induction of NF-κB activation) when a gene is introduced into a suitable cell and the protein encoded by the gene is excessively expressed. Activation of NF-κB can be measured, for example, by an assay using an NF-κB dependant reporter gene. In the assay, activation may be reflected by increasing the reporter activity compared to control cells (cells into which the vector only was introduced). Increase in reporter activity is preferably by a factor of 1.5 or more, more preferably by a factor of 2 or more, and still more preferably by a factor of 5 or more.

[0113] Reporter activity can be measured by cloning a polynucleotide (e.g. cDNA) encoding the protein to be expressed into a suitable expression vector, co-transfecting the expression vector and an NF-κB dependant reporter plasmid into a suitable cell, and after culturing for a certain period, then measuring reporter activity. Suitable expression vectors are well known to those skilled in the art, examples of which include pME18S-FL3, pcDNA3.1 (Invitrogen). The reporter gene can be one which enables a person skilled in the art to easily detect the expression thereof, and examples include a gene encoding luciferase, chloramphenicol acetyl transferase, or β-galactosidase. Use of a gene encoding luciferase is most preferable, and examples of an NF-κB dependent reporter plasmid include pNF-κB-Luc (STRATAGENE). Suitable cells include cells which exhibit an NF-κB activation response to stimulation by IL-1, TNF-α and the like. Examples include 293-EBNA cells. Cell culture and introduction of genes into cells (transfection) can be performed and optimized by a person skilled in the art by known techniques.

[0114] As a preferable method, 293-EBNA cells are inoculated on 5% FBS (Fetal Bovine Serum) containing DMEM medium (Dulbecco's Modified Eagle Medium) in a 96-well cell culture plate to a final cell density of 1×10⁴ cells/well, and cultured for 24 hours at 37° C. in the presence of 5% CO₂. Then, reporter plasmid pNF-κB-Luc (STRATAGENE) and the expression vector are cotransfected into the cells in a well using FuGENE 6 (Roche). After 24 hours of culture at 37° C., NF-κB activation is then measured by measuring luciferase activity using a long term luciferase assay system, Picagene LT2.0 (Toyo Ink Mfg). For example, luciferase activity can be measured using PerkinElmer's Wallac ARVO™ST 1420 MULTILABEL COUNTER. The method for gene introduction by FuGENE6, and measurement of luciferase activity by Picagene LT2.0 can be performed respectively according to the attached protocols. In a method of gene introduction with a 96-well plate using FuGENE6, the amount of FuGENE6 per 1 well is suitably 0.3 to 0.5 μl, preferably 0.3 μl; the amount of pNF-κB-Luc plasmid is suitably 50 to 100 ng, preferably 50 ng; the amount of expression vector is suitably 50-100 ng, and preferably 100 ng. An ability to activate NF-κB refers to an ability to increase the reporter activity (luciferase activity) relative to the control experiment (cells into which only a null vector was introduced). Increase in reporter activity is preferably by a factor of 1.5 or more, more preferably by a factor of 2 or more, and still more preferably by a factor of 5 or more.

[0115] Related to the amino acid sequences of any one of SEQ ID NOS. 1, 3, 5, 7, 9, 11, 13, 15, 17, 19, 21, 23, 25, 27, 29, 31, 33, 35, 37, 39, 41, 43, 45, 47, 49, 51, 53, 55, 57, 59, 61, 63, 65, 67, 69, 71, 73, 75, 77, 79, 81, 83, 85, 87, 89, 91, 93, 95, 97, 99, 101, 103, 105, 107, 109, 111, 113, 115, 117, 119, 121, 123, 125, 127, 129, 131, 133, 135, 137, 139, 141, 143, 145, 147, 149, 152, 154, 156, 158, 160, 162, 164, 166, 168, 170, 172, 174, 176, 178 and 180, the present invention provides for a protein that:

[0116] (a) comprises one of the above amino acid sequences;

[0117] (b) is a peptide having one of the above amino acid sequences;

[0118] (c) activates NF-κB and consists of an amino acid sequence having at least one amino acid deletion, substitution or addition in the above amino acid sequences;

[0119] (d) comprises an amino acid sequence, which has at least 95% identity, preferably at least 97-99% identity, to an amino acid sequence of SEQ ID NO: 1, 3, 5, 7, 9, 11, 13, 15, 17, 19, 21, 23, 25, 27, 29, 31, 33, 35, 37, 39, 41, 43, 45, 47, 49, 51, 53, 55, 57, 59, 61, 63, 65, 67, 69, 71, 73, 75, 77, 79, 81, 83, 85, 87, 89, 91, 93, 95, 97, 99, 101, 103, 105, 107, 109, 111, 113, 115, 117, 119, 121, 123, 125, 127, 129, 131, 133, 135, 137, 139, 141, 143, 145, 147, 149, 152, 154, 156, 158, 160, 162, 164, 166, 168, 170, 172, 174, 176, 178 or 180, over the entire length thereof.

[0120] “Identity” as known in the art, is a relationship between two or more protein sequence or two or more polynucleotide sequences, as determined by comparing the sequences. In the art, “identity” also means the degree of sequence relatedness between protein or polynucleotide sequences, as determined by the match between protein or polynucleotide sequences, as the case may be, as determined by the match between strings of such sequences. “Identity” and “similarity” can be readily calculated by known methods. Preferred methods to determine identity are designed to give the largest match between the sequences tested. Methods to determine identity and similarity are codified in publicly available computer programs. “Identity” can be determined by using the BLAST program (for example, Altschul S F, Gish W, Miller W, Myers E W, Lipman D J., J. Mol. Biol., 215: p403-410 (1990), Altschul S F, Madden T L, Schaffer A A, Zhang Z, Miller W, Lipman D J,. Nucleic Acids Res. 25: p3389-3402 (1997)). Where software such as BLAST is used, it is preferable to use default values. The main initial conditions generally used in a BLAST search are as follows, but are not limited to these.

[0121] An amino acid substitution matrix is a matrix numerically representing the degree of analogy of each pairing of each of the 20 types of amino acid, and normally the default matrix of BLOSUM62 is used. The theory of this amino acid substitution matrix is shown in Altschul S. F., J. Mol. Biol. 219: 555-565 (1991), and applicability to DNA sequence comparison is shown on States D. J., Gish W., Altschul S. F., Methods, 3: 66-70 (1991). In this case, optimal gap cost is determined by experience and in the case of BLOSUM62 preferably parameters of Existence 11, Extension 1 are used. The expected value (EXPECT) is the threshold value concerning statistical significance for a match with a database sequence, and the default value is 10.

[0122] As one example, a protein having, for example, 95% or more identity to the amino acid sequence of SEQ ID NO: 2 may contain in the amino acid sequence up to 5 amino acid changes per 100 amino acids of the amino acid sequence of SEQ ID NO: 2. In other words, a protein having 95% or more amino acid sequence identity to a subject amino acid sequence, may have amino acids up to 5% of the total number of amino acids within the subject sequence, deleted or substituted by other amino acids, or amino acids up to 5% of the total number of amino acids within the subject sequence may be inserted within the subject sequence. These changes within the subject sequence, may exist at the amino terminus or the carboxy terminus of the subject sequence, or may exist at any position between these termini, or may form one or more groups of changes.

[0123] The Examples described below demonstrate that the protein consisting of an amino acid sequence of any one of the above SEQ ID NO: 1, 3, 5, 7, 9, 11, 13, 15, 17, 19, 21, 23, 25, 27, 29, 31, 33, 35, 37, 39, 41, 43, 45, 47, 49, 51, 53, 55, 57, 59, 61, 63, 65, 67, 69, 71, 73, 75, 77, 79, 81, 83, 85, 87, 89, 91, 93, 95, 97, 99, 101, 103, 105, 107, 109, 111, 113, 115, 117, 119, 121, 123, 125, 127, 129, 131, 133, 135, 137, 139, 141, 143, 145, 147, 149, 152, 154, 156, 158, 160, 162, 164, 166, 168, 170, 172, 174, 176, 178 and 180, is capable of activating NF-κB.

[0124] Related to the polynucleotide sequence of any one of SEQ ID NOS: 2, 4, 6, 8, 10, 12, 14, 16, 18, 20, 22, 24, 26, 28, 30, 32, 34, 36, 38, 40, 42, 44, 46, 48, 50, 52, 54, 56, 58, 60, 62, 64, 66, 68, 70, 72, 74, 76, 78, 80, 82, 84, 86, 88, 90, 92, 94, 96, 98, 100, 102, 104, 106, 108, 110, 112, 114, 116, 118, 120, 122, 124, 126, 128, 130, 132, 134, 136, 138, 140, 142, 144, 146, 148, 150, 151, 153, 155, 157, 159, 161, 163, 165, 167, 169, 171, 173, 175, 177 and 179, the present invention further provides an isolated polynucleotide that:

[0125] (a) comprises a nucleotide sequence, which has at least 95% identity, preferably at least 97-99% identity to any one of the above sequences;

[0126] (b) is a polynucleotide of any one of the above sequences; or

[0127] (c) has a nucleotide sequence encoding a protein which has at least 95% identity, preferably, at least 97-99% identity, to the amino acid sequence of any one of SEQ ID NOs: 1, 3, 5, 7, 9, 11, 13, 15, 17, 19, 21, 23, 25, 27, 29, 31, 33, 35, 37, 39, 41, 43, 45, 47, 49, 51, 53, 55, 57, 59, 61, 63, 65, 67, 69, 71, 73, 75, 77, 79, 81, 83, 85, 87, 89, 91, 93, 95, 97, 99, 101, 103, 105, 107, 109, 111, 113, 115, 117, 119, 121, 123, 125, 127, 129, 131, 133, 135, 137, 139, 141, 143, 145, 147, 149, 152, 154, 156, 158, 160, 162, 164, 166, 168, 170, 172, 174, 176, 178 and 180.

[0128] Polynucleotides which are identical or almost identical to nucleotide sequences contained in the above nucleotide sequences may be used as hybridization probes to isolate full-length cDNA and genomic clones encoding the protein of the present invention, or cDNA or genomic clones of other genes that have a high sequence similarity to the above sequences, or genomic clones, or may be used as primers for nucleic acid amplification reactions. Typically, these nucleotide sequences are 70% identical, preferably 80% identical, more preferably 90% identical, most preferably 95% identical to the above sequences. The probes or primers will generally comprises at least 15 nucleotides, preferably 30 nucleotides and may have 50 nucleotides. Particularly preferred probes will have between 30 and 50 nucleotides. Particularly preferred primers have between 20 and 25 nucleotides.

[0129] The polynucleotide of the present invention may be either in the form of a DNA such as cDNA, a genomic DNA obtained by cloning or synthetically produced, or may be in the form of RNA such as mRNA. The polynucleotide may be single-stranded or double-stranded. The double-stranded polynucleotides may be double-stranded DNA, double-stranded RNA or DNA:RNA hybrid. The single-stranded polynucleotide may be sense strand also known as coding strand or antisense strand also known as non-coding strand.

[0130] Those skilled in the art can prepare a protein having the same NF-κB activating activity as the protein having an amino acid sequence of any one of SEQ ID NO: 1, 3, 5, 7, 9, 11, 13, 15, 17, 19, 21, 23, 25, 27, 29, 31, 33, 35, 37, 39, 41, 43, 45, 47, 49, 51, 53, 55, 57, 59, 61, 63, 65, 67, 69, 71, 73, 75, 77, 79, 81, 83, 85, 87, 89, 91, 93, 95, 97, 99, 101, 103, 105, 107, 109, 111, 113, 115, 117, 119, 121, 123, 125, 127, 129, 131, 133, 135, 137, 139, 141, 143, 145, 147, 149, 152, 154, 156, 158, 160, 162, 164, 166, 168, 170, 172, 174, 176, 178 and 180, by means of appropriate substitution of an amino acid in the protein using known methods. One such method involves using conventional mutagenesis procedures for the DNA encoding the protein. Another method is, for example, site-directed mutagenesis (e.g., Mutan-Super Express Km Kit from Takara Shuzo Co., Ltd.). Mutations of amino acids in proteins may also occur in nature. Thus, the present invention also includes a mutated protein which is capable of activating NF-κB and which has at least one amino acid deletion, substitution or addition relative to the protein of any one of SEQ ID NO: 1, 3, 5, 7, 9, 11, 13, 15, 17, 19, 21, 23, 25, 27, 29, 31, 33, 35, 37, 39, 41, 43, 45, 47, 49, 51, 53, 55, 57, 59, 61, 63, 65, 67, 69, 71, 73, 75, 77, 79, 81, 83, 85, 87, 89, 91, 93, 95, 97, 99, 101, 103, 105, 107, 109, 111, 113, 115, 117, 119, 121, 123, 125, 127, 129, 131, 133, 135, 137, 139, 141, 143, 145, 147, 149, 152, 154, 156, 158, 160, 162, 164, 166, 168, 170, 172, 174, 176, 178 and 180, and the DNA encoding the protein. The number of mutations is preferably up to 10, more preferably up to 5, most preferably up to 3.

[0131] The substitutions of amino acids are preferably conservative substitutions, specific examples of which are substitutions within the following groups: (glycine, alanine), (valine, isoleucine, leucine), (aspartic acid, glutamic acid), (asparagine, glutamine), (serine, threonine), (lysine, arginine) and (phenylalanine, tyrosine).

[0132] Based on the nucleotide sequences (e.g., SEQ ID NO: 2) encoding a protein consisting of an amino acid sequence of any one of SEQ ID NO: 1, 3, 5, 7, 9, 11, 13, 15, 17, 19, 21, 23, 25, 27, 29, 31, 33, 35, 37, 39, 41, 43, 45, 47, 49, 51, 53, 55, 57, 59, 61, 63, 65, 67, 69, 71, 73, 75, 77, 79, 81, 83, 85, 87, 89, 91, 93, 95, 97, 99, 101, 103, 105, 107, 109, 111, 113, 115, 117, 119, 121, 123, 125, 127, 129, 131, 133, 135, 137, 139, 141, 143, 145, 147, 149, 152, 154, 156, 158, 160, 162, 164, 166, 168, 170, 172, 174, 176, 178 and 180 or a fragment thereof, those skilled in the art can routinely isolate a DNA with a high sequence similarity to these nucleotide sequences by using hybridization techniques and the like, and obtain proteins having the same NF-κB activating activity as the protein having of an amino acid sequence of any one of SEQ ID NO:1, 3, 5, 7, 9, 11, 13, 15, 17, 19, 21, 23, 25, 27, 29, 31, 33, 35, 37, 39, 41, 43, 45, 47, 49, 51, 53, 55, 57, 59, 61, 63, 65, 67, 69, 71, 73, 75, 77, 79, 81, 83, 85, 87, 89, 91, 93, 95, 97, 99, 101, 103, 105, 107, 109, 111, 113, 115, 117, 119, 121, 123, 125, 127, 129, 131, 133, 135, 137, 139, 141, 143, 145, 147, 149, 152, 154, 156, 158, 160, 162, 164, 166, 168, 170, 172, 174, 176, 178 and 180. Thus, the present invention also includes a protein that activates NF-κB and comprises an amino acid sequence having a high identity to the amino acid sequence of any one of the above SEQ ID NO:1, 3, 5, 7, 9, 11, 13, 15, 17, 19, 21, 23, 25, 27, 29, 31, 33, 35, 37, 39, 41, 43, 45, 47, 49, 51, 53, 55, 57, 59, 61, 63, 65, 67, 69, 71, 73, 75, 77, 79, 81, 83, 85, 87, 89, 91, 93, 95, 97, 99, 101, 103, 105, 107, 109, 111, 113, 115, 117, 119, 121, 123, 125, 127, 129, 131, 133, 135, 137, 139, 141, 143, 145, 147, 149, 152, 154, 156, 158, 160, 162, 164, 166, 168, 170, 172, 174, 176, 178 and 180. “High identity” refers to an amino acid sequence having an identity of at least 90%, preferably 95%, and more preferably at least 97% over the entire length of an amino acid sequence expressed by any one of the above SEQ ID NO:1, 3,5,7, 9, 11, 13, 15, 17, 19, 21, 23, 25, 27, 29, 31, 33, 35, 37, 39, 41, 43, 45, 47, 49, 51, 53, 55, 57, 59, 61, 63, 65, 67, 69, 71, 73, 75, 77, 79, 81, 83, 85, 87, 89, 91, 93, 95, 97, 99, 101, 103, 105, 107, 109, 111, 113, 115, 117, 119, 121, 123, 125, 127, 129, 131, 133, 135, 137, 139, 141, 143, 145, 147, 149, 152, 154, 156, 158, 160, 162, 164, 166, 168, 170, 172, 174, 176, 178 and 180. The proteins of the present invention may be natural proteins derived from any human or animal cells or tissues, chemically synthesized proteins, or proteins obtained by genetic recombination techniques. The protein may or may not be subjected to post-translational modifications such as sugar chain addition or phosphorylation.

[0133] The present invention also includes a polynucleotide encoding the above protein of the present invention. Examples of nucleotide sequences encoding a protein consisting of an amino acid sequence of any one of SEQ ID NOS: 1, 3, 5, 7, 9, 11, 13, 15, 17, 19, 21, 23, 25, 27, 29, 31, 33, 35, 37, 39, 41, 43, 45, 47, 49, 51, 53, 55, 57, 59, 61, 63, 65, 67, 69, 71, 73, 75, 77, 79, 81, 83, 85, 87, 89, 91, 93, 95, 97, 99, 101, 103, 105, 107, 109, 111, 113, 115, 117, 119, 121, 123, 125, 127, 129, 131, 133, 135, 137, 139, 141, 143, 145, 147, 149, 152, 154, 156, 158, 160, 162, 164, 166, 168, 170, 172, 174, 176, 178 and 180 include nucleotide sequences of any one of SEQ ID NOS: 2, 4, 6, 8, 10, 12, 14, 16, 18, 20, 22, 24, 26, 28, 30, 32, 34, 36, 38, 40, 42, 44, 46, 48, 50, 52, 54, 56, 58, 60, 62, 64, 66, 68, 70, 72, 74, 76, 78, 80, 82, 84, 86, 88, 90, 92, 94, 96, 98, 100, 102, 104, 106, 108, 110, 112, 114, 116, 118, 120, 122, 124, 126, 128, 130, 132, 134, 136, 138, 140, 142, 144, 146, 148, 150, 151, 153, 155, 157, 159, 161, 163, 165, 167, 169, 171, 173, 175, 177 and 179. The DNA includes cDNA, genomic DNA, and chemically synthesized DNA. In accordance with the degeneracy of the genetic code, at least one nucleotide in the nucleotide sequence encoding a protein consisting of an amino acid sequence of any one of SEQ ID NOS: 1, 3, 5, 7, 9, 11, 13, 15, 17, 19, 21, 23, 25, 27, 29, 31, 33, 35, 37, 39, 41, 43, 45, 47, 49, 51, 53, 55, 57, 59, 61, 63, 65, 67, 69, 71, 73, 75, 77, 79, 81, 83, 85, 87, 89, 91, 93, 95, 97, 99, 101, 103, 105, 107, 109, 111, 113, 115, 117, 119, 121, 123, 125, 127, 129, 131, 133, 135, 137, 139, 141, 143, 145, 147, 149, 152, 154, 156, 158, 160, 162, 164, 166, 168, 170, 172, 174, 176, 178 and 180 can be substituted with other nucleotides without altering the amino acid sequence of the protein produced from the gene. Therefore, the DNA sequences of the present invention also include nucleotide sequences altered by substitution based on the degeneracy of the genetic code. Such DNA sequences can be synthesized using known methods.

[0134] The DNA of the present invention includes a DNA which encodes a protein capable of activating NF-κB and hybridizes under stringent conditions with the DNA sequence of the above nucleotide sequence of any one of SEQ ID NOS: 2, 4, 6, 8, 10, 12, 14, 16, 18, 20, 22, 24, 26, 28, 30, 32, 34, 36, 38, 40, 42, 44, 46, 48, 50, 52, 54, 56, 58, 60, 62, 64, 66, 68, 70, 72, 74, 76, 78, 80, 82, 84, 86, 88, 90, 92, 94, 96, 98, 100, 102, 104, 106, 108, 110, 112, 114, 116, 118, 120, 122, 124, 126, 128, 130, 132, 134, 136, 138, 140, 142, 144, 146, 148, 150, 151, 153, 155, 157, 159, 161, 163, 165, 167, 169, 171, 173, 175, 177 and 179. Stringent conditions are apparent to those skilled in the art, and can be easily attained in accordance with various laboratory manuals such as T. Maniatis et al., Molecular Cloning A Laboratory Manual, Cold Spring Harbor Laboratory 1982, 1989.

[0135] That is, “stringent conditions” refer to overnight incubation at 37° C. in a hybridization solution containing 30% formamide, 5×SSC (0.75 M NaCl, 75mM trisodium citrate), 5×Denhardt's solution, 0.5% SDS, 100, μg/ml denatured, sheared salmon sperm DNA) followed by washing (three times) in 2×SSC, 0.1% SDS for 10 minutes at room temperature, then followed by washing (two times) in 0.2×SSC, 0.1% SDS for 10 minutes at 37° C. (low stringency). Preferred stringent conditions are overnight incubation at 42° C. in a hybridization solution containing 40% formamide, followed by washing (three times) in 2×SSC, 0.1% SDS for 10 minutes at room temperature, then followed by washing (two times) in 0.2×SSC, 0.1% SDS for 10 minutes at 42° C.(moderate stringency). More preferred stringent conditions are overnight incubation at 42° C. in a hybridization solution containing 50% formamide, followed by washing (three times) in 2×SSC, 0.1% SDS for 10 minutes at room temperature, followed by washing (two times) in 0.2×SSC, 0.1% SDS for 10 minutes at 50° C. (high stringency). The DNA sequence thus obtained must encode a protein capable of activating NF-κB.

[0136] The present invention also includes a polynucleotide comprising a nucleotide sequence which encodes a protein capable of activating NF-κB and has a high sequence similarity to the nucleotide sequence of the polynucleotide according to above item (3) or (4). Typically these nucleotide sequence are 95% identical, preferably 97% identical, more preferably 98-99% identical, most preferably at least 99% identical to the nucleotide sequence of the polynucleotide according to above item (3) or (4) over the entire length thereof.

[0137] The above nucleotide sequence of the present invention can be used to produce the above protein using recombinant DNA techniques. In general, the DNA and peptide of the present invention can be obtained by:

[0138] (A) cloning the DNA encoding the protein of the present invention;

[0139] (B) inserting the DNA encoding the entire coding region of the protein or a part thereof into an expression vector to construct a recombinant vector;

[0140] (C) transforming host cells with the recombinant vector thus constructed; and

[0141] (D) culturing the obtained cells to express the protein or its analogue, and then purifying it by column chromatography.

[0142] General procedures necessary to handle DNA and recombinant host cells (e.g., E. coli) in the above steps are well known to those skilled in the art, and can be easily carried out in accordance with various laboratory manuals such as T. Maniatis et al., supra. All the enzymes, reagents, etc., used in these procedures are commercially available, and unless otherwise stated, such commercially available products can be used according to the use conditions specified by the manufacturer's instructions to attain completely its objects. The above steps (A) to (D) can be further illustrated in more details as follows.

[0143] Techniques for cloning the DNA encoding the protein of the present invention include, in addition to the methods described in the specification of the present application, PCR amplification using a synthetic DNA having a part of the nucleotide sequence of the present invention (e.g., any one of SEQ ID NOS: 2, 4, 6, 8, 10, 12, 14, 16, 18, 20, 22, 24, 26, 28, 30, 32, 34, 36, 38, 40, 42, 44, 46, 48, 50, 52, 54, 56, 58, 60, 62, 64, 66, 68, 70, 72, 74, 76, 78, 80, 82, 84, 86, 88, 90, 92, 94, 96, 98, 100, 102, 104, 106, 108, 110, 112, 114, 116, 118, 120, 122, 124, 126, 128, 130, 132, 134, 136, 138, 140, 142, 144, 146, 148, 150, 151, 153, 155, 157, 159, 161, 163, 165, 167, 169, 171, 173, 175, 177 and 179) as a primer, and selection of the DNA inserted into a suitable vector by hybridization with a labeled DNA fragment encoding a partial or full coding region of the protein of the present invention or a labeled synthetic DNA. Another technique involves direct amplification from total RNAs or mRNA fractions prepared from cells or tissues, using the reverse transcriptase polymerase chain reaction (RT-PCR method). As a DNA inserted into a suitable vector, for example, a commercially available library (e.g., from CLONTECH and STRATAGENE) can be used. Techniques for hybridization are normally used in the art, and can be easily carried out in accordance with various laboratory manuals such as T. Maniatis et al., supra. Depending on the intended purpose, the cloned DNA encoding the protein of the present invention can be used as such or if desired after digestion with a restriction enzyme or addition of a linker. The DNA thus obtained may have a nucleotide sequence of any one of SEQ ID NOS: 2, 4, 6, 8, 10, 12, 14, 16, 18, 20, 22, 24, 26, 28, 30, 32, 34, 36, 38, 40, 42, 44, 46, 48, 50, 52, 54, 56, 58, 60, 62, 64, 66, 68, 70, 72, 74, 76, 78, 80, 82, 84, 86, 88, 90, 92, 94, 96, 98, 100, 102, 104, 106, 108, 110, 112, 114, 116, 118, 120, 122, 124, 126, 128, 130, 132, 134, 136, 138, 140, 142, 144, 146, 148, 150, 151, 153, 155, 157, 159, 161, 163, 165, 167, 169, 171, 173, 175, 177 and 179, or a polynucleotide of above items (3) to (6). The DNA sequence to be inserted into an expression vector in the above step (B) may be a full-length cDNA or a DNA fragment encoding the above full-length protein, or a DNA fragment constructed so that it expresses a part thereof.

[0144] Thus, the present invention also includes a recombinant vector, which comprises the above DNA sequence. The expression vector for the protein of the present invention can be produced, for example, by excising the desired DNA fragment from the DNA encoding the protein of the present invention, and ligating the DNA fragment downstream of a promoter in a suitable expression vector.

[0145] Expression vectors for use in the present invention may be any vectors derived from prokaryotes (e.g., E. coli), yeast, fungi, insect viruses and vertebrate viruses so long as such vectors are replicable. However, the vectors should be selected to be compatible with microorganisms or cells used as hosts. Suitable combinations of host cell—expression vector systems are selected depending on the desired expression product.

[0146] When microorganisms are used as hosts, plasmid vectors compatible with these microorganisms are generally used as replicable expression vectors for recombinant DNA molecules.

[0147] For example, the plasmids pBR322 and pBR327 can be used to transform E. coli. Plasmid vectors normally contain an origin of replication, a promoter, and a marker gene conferring upon a recombinant DNA a phenotype useful for selecting the cells transformed with the recombinant DNA. Example of such promoters include a β-lactamase promoter, lactose promoter and tryptophan promoter. Examples of such marker genes include an ampicillin resistance gene, and a tetracycline resistance gene. Examples of suitable expression vectors include the plasmids pUC18 and pUC19 in addition to pBR322, pBR327.

[0148] In order to express the DNA of the present invention in yeast, for example, YEp24 can be used as a replicable vector. The plasmid YEp24 contains the URA3 gene, which can be employed as a marker gene. Examples of promoters in expression vectors for yeast cells include promoters derived from genes for 3-phosphoglycerate kinase, glyceraldehyde-3-phosphate dehydrogenase and alcohol dehydrogenase.

[0149] Examples of promoters and terminators for use in expression vectors to express the DNA of the present invention in fungal cells include promoters and terminators derived from genes for phosphoglycerate kinase (PGK), glyceraldehyde-3-phosphate dehydrogenase (GAPD) and actin. Examples of suitable expression vectors include the plasmids pPGACY2 and pBSFAHY83.

[0150] Examples of promoters for use in expression vectors to express the DNA of the present invention in insect cells include a polyhedrin promoter and P10 promoter.

[0151] Recombinant vectors used to express the DNA of the present invention in animal cells normally contain functional sequences to regulate genes, such as an origin of replication, a promoter to be placed upstream of the DNA of the present invention, a ribosome-binding site, a polyadenylation site and a transcription termination sequence. Such functional sequences, which can be used to express the DNA of the present invention in eukaryotic cells, can be obtained from viruses and viral substances. Examples of such functional sequences include an SRα promoter, SV40 promoter, LTR promoter, CMV (cytomegalovirus) promoter and HSV-TK promoter. Among them, a CMV promoter and SRα promoter can be preferably used. As promoters to be placed inherently upstream of the gene encoding the protein of the present invention, any promoters can be used so long as they are suitable for use in the above host-vector systems. Examples of origins of replication include foreign origins of replication, for example, those derived from viruses such as adenovirus, polyoma virus and SV40 virus. When vectors capable of integration into host chromosomes are used as expression vectors, origins of replication of the host chromosomes may be employed. Examples of suitable expression vectors include the plasmids pSV-dhfr (ATCC 37146), pBPV-1(9-1) (ATCC 37111), pcDNA3.1 (INVITROGEN) and pME18S-FL3.

[0152] The present invention also includes a transformed cell, which comprises the above recombinant vector.

[0153] Microorganisms or cells transformed with the replicable recombinant vector of the present invention can be selected from remaining untransformed parent cells based on at least one phenotype conferred by the recombinant vector. Phenotypes can be conferred by inserting at least one marker gene into the recombinant vector. Marker genes naturally contained in replicable vectors can be employed. Examples of marker genes include drug resistance genes such as neomycin resistance genes, and genes encoding dihydrofolate reductase.

[0154] As hosts for use in the above step (C), any of prokaryotes (e.g., E. coli), microorganisms (e.g., yeast and fungi) as well as insect and animal cells can be used so long as such hosts are compatible with the expression vectors used. Examples of such microorganisms include Escherichia coli strains such as E. coli K12 strain 294 (ATCC 31446), E. coli X1776 (ATCC 31537), E. coli C600, E. coli JM109 and E. coli B strain; bacterial strains belonging to the genus Bacillus such as Bacillus subtilis; intestinal bacteria other than E. coli, such as Salmonella typhimurium or Serratia marcescens; and various strains belonging to the genus Pseudomonas. Examples of such yeast include Saccharomyces cerevisiae, Schizosaccharomyces pombe, and Pichia pastoris. Examples of such fungi include Aspergillus nidulans, and Acremonium chrysogenum (ATCC 11550).

[0155] As insect cells, for example, Spodoptera frugiperda (Sf cells), High Five™ cells derived from eggs of Trichoplusiani, etc., can be used when the virus is AcNPV. Examples of such animal cells include HEK 293 cells, COS-1 cells, COS-7 cells, Hela cells, and Chinese hamster ovary (CHO) cells. Among them, CHO cells and HEK 293 cells are preferred.

[0156] When cells are used as hosts, combinations of expression vectors and host cells to be used vary with experimental objects. According to such combinations, two types of expression (i.e. transient expression and constitutive expression) can be included.

[0157] “Transformation” of microorganisms and cells in the above step (C) refers to introducing DNA into microorganisms or cells by forcible methods or phagocytosis of cells and then transiently or constitutively expressing the trait of the DNA in a plasmid or an intra-chromosome integrated form. Those skilled in the art can carry out transformation by known methods [see e.g., “Idenshi Kougaku Handbook (Genetic Engineering Handbook)”, an extra issue of “Jikken Igaku (Experimental Medicine)”, YODOSHA CO., LTD.]. For example, in the case of animal cells, DNA can be introduced into cells by known methods such as DEAE-dextran method, calcium-phosphate-mediated transfection, electroporation, lipofection, etc. For stable expression of the protein of the present invention using animal cells, there is a method in which selection can be carried out by clonal selection of the animal cells containing the chromosomes into which the introduced expression vectors have been integrated. For example, transformants can be selected using the above selectable marker as an indication of successful transformation. In addition, the animal cells thus obtained using the selectable marker can be subjected to repeated clonal selection to obtain stable animal cell strains highly capable of expressing the protein of the present invention. When a dihydrofolate reductase (DHFR) gene is used as a selectable marker, one can culture animal cells while gradually increasing the concentration of methotrexate (MTX) and select the resistant strains, thereby amplifying the DNA encoding the protein of the present invention together with the DHFR gene to obtain animal cell strains having higher levels of expression.

[0158] The above transformed cells can be cultured under conditions which permit the expression of the DNA encoding the protein of the present invention to produce and accumulate the protein of the present invention. In this manner, the protein of the present invention can be produced. Thus, the present invention also includes a process for producing a protein, which comprises culturing a transformed cell comprising the isolated polynucleotide according to above item (3) to (6) under conditions providing expression of the encoded protein and recovering the protein from the culture.

[0159] The above transformed cells can be cultured by methods known to those skilled in the art (see e.g., “Bio Manual Series 4”, YODOSHA CO., LTD.). For example, animal cells can be cultured by various known animal cell culture methods including attachment culture such as Petri dish culture, multitray type culture and module culture, attachment culture in which cells are attached to cell culture carriers (microcarriers), suspension culture in which productive cells themselves are suspended. Examples of media for use in the culture include media commonly used for animal cell culture, such as D-MEM and RPMI 1640.

[0160] In order to separate and purify the protein of the present invention from the above culture, suitable combinations of per se known separation and purification methods can be used. Examples such methods include methods based on solubility, such as salting-out and solvent precipitation; methods based on the difference in charges, such as ion-exchange chromatography; methods mainly based on the difference in molecular weights, such as dialysis, ultrafiltration, gel filtration and SDS-polyacrylamide gel electrophoresis; methods based on specific affinity, such as affinity chromatography; methods based on the difference in hydrophobicity, such as reverse phase high performance liquid chromatography; and methods based on the difference in isoelectric points, such as isoelectric focusing. For example, a protein of the present invention can be recovered and purified from recombinant cell cultures by well-known methods including ammonium sulfate or ethanol precipitation, acid extraction, anion or cation exchange chromatography, phosphocellulose chromatography, hydrophobic interaction chromatography, affinity chromatography, hydroxyapatite chromatography and lectin chromatography. Most preferably, high performance liquid chromatography is employed for purification. Well known techniques for refolding proteins may be employed to regenerate active conformation when the polypeptide is denatured during intracellular synthesis, isolation or purification.

[0161] The protein of the present invention can also be produced as a fusion protein with another protein. These fusion proteins are also included within the present invention. For the expression of such fusion proteins, any vectors can be used so long as the DNA encoding the protein can be inserted into the vectors and the vectors can express the fusion protein. Examples of proteins to which a polypeptide of the present invention can be fused include glutathione S-transferase (GST) and a hexa-histidine sequence (6×His). The fusion protein of the protein of the present invention with another protein can be advantageously purified by affinity chromatography using a substance with an affinity for the fusion partner protein. For example, fusion proteins with GST can be purified by affinity chromatography using glutathione as a ligand.

[0162] The present invention also includes an inhibitory protein, i.e., a protein capable of inhibiting the activity of the protein of above item (7). Examples of such inhibitory proteins include antibodies, or other proteins that bind to active sites of a protein of the above item (7), thereby inhibiting the expression of their activity.

[0163] The present invention also relates to an antibody that specifically binds the protein of the present invention or a fragment thereof, and to production of such an antibody. The antibody is not specifically limited so long as it can recognize the protein of the present invention. Examples of such antibodies include polyclonal antibodies, monoclonal antibodies and their fragments, single chain antibodies and humanized antibodies. Antibody fragments can be produced by known techniques. Examples of such antibody fragments include, but not limited to, F(ab′)₂ fragments, Fab′ fragments, Fab fragments and Fv fragments. The antibody that specifically binds the protein of the present invention can be produced using the protein of the present invention or a peptide thereof as an immunogen according to per se known process for producing antibodies or antisera. For example, a monoclonal or polyclonal antibody can be produced by administering the protein according to above item (1) or (2) as an antigen or epitope-bearing fragments to a non-human animal. Such methods are described, for example, in “Shin Idenshi Kougaku Handbook (New Genetic Engineering Handbook)”, the third edition, an extra issue of “Jikken Igaku (Experimental Medicine)”, YODOSHA CO., LTD.

[0164] In the case of polyclonal antibodies, for example, the protein of the present invention or a peptide thereof can be injected to animals such as rabbits to produce antibodies directed against the protein or peptide, and then their blood can be collected. The polyclonal antibodies can be purified from the blood, for example, by ammonium sulfate precipitation or ion-exchange chromatography, or by using the affinity column on which the protein has been immobilized.

[0165] In the case of monoclonal antibodies, for example, animals such as mice are immunized with the protein of the present invention, their spleen is removed and homogenized to obtain spleen cells, which are then fused with mouse myeloma cells by using a reagent such as polyethylene glycol. From the resulting hybrid cells (i.e. hybridoma cells), the clone producing the antibody directed against the protein of the present invention can be selected. Then, the resulting clonal hybridoma cells can be implanted intraperitoneally into mice, the ascitic fluid recovered from the mice. The resulting monoclonal antibody can be purified, for example, by ammonium sulfate precipitation or ion-exchange chromatography, or by using the affinity column on which the protein has been immobilized.

[0166] When the resulting antibody is used to administer it to humans, it is preferably used as a humanized antibody or human antibody in order to reduce its immunogenicity. The humanized antibody can be produced using transgenic mice or other mammals. For a general review of these humanized antibodies and human antibodies, see, for example, Morrison, S. L. et al., Proc. Natl. Acad. Sci. USA, 81:6851-6855 (1984); Jones, P. T. et al., Nature 321:522-525 (1986); Hiroshi Noguchi, Igaku no Ayumi (J. Clin. Exp. Med.) 167:457-462 (1993); Takashi Matsumoto, Kagaku to Seibutsu (Chemistry and Biology) 36:448-456 (1998). Humanized chimeric antibodies can be produced by linking a V region of a mouse antibody to a C region of a human antibody. Humanized antibodies can be produced by substituting a sequence derived from a human antibody for a region other than a complementarity-determining region from a mouse monoclonal antibody. In addition, human antibodies can be directly produced in the same manner as the production of conventional monoclonal antibodies by immunizing the mice whose immune systems have been replaced with human immune systems. These antibodies can be used to isolate or to identify clones expressing the protein or to purify the protein of the present invention from a cell extract or transformed cells producing the protein of the present invention. These proteins can also be used to construct ELISA, RIA (radioimmunoassay) and western blotting systems. These assay systems can be used for diagnostic purposes for detecting an amount of the protein of the present invention present in a body sample in a tissue or a fluid in the blood of an animal, preferably human. For example, they can be used for diagnosis of a disease characterized by undesirable activation of HF-κB resulting from (expression) abnormality of the protein of the present invention, such as inflammation, autoimmune disease, infection (for example, HIV infection), bone disease, cancer and the like. In order to provide a basis for diagnosis of a disease, a standard value must be established. However, this is a well-known technique to those skilled in the art. For example, a method of calculating the standard value comprises binding a body fluid or a cell extract of normal individual of a human or an animal to an antibody against the protein of the present invention under a suitable condition for the complex formation, detecting the amount of the antibody-protein complex by chemical or physical means and then calculating the standard value for the normal sample using a standard curve prepared from a standard solution containing a known amount of an antigen (the protein of the present invention). The presence of a disease can be confirmed by deviation from the standard value obtained by comparison of the standard value with the value obtained from a sample of an individual latently suffering from a disease associated with the protein of the present invention. These antibodies can also be used as reagents for studying functions of the protein of the present invention.

[0167] The antibodies of the present invention can be purified and then administered to patients of a disease characterized by undesirable activation of NF-κB resulting from (expression) abnormality of the protein of the present invention, such as inflammation, autoimmune disease, infection (such as HIV infection), bone disease, cancer and the like. Thus in another aspect, the present invention is a pharmaceutical composition which comprises the above antibody as an active ingredient, and therapy using the antibody of the present invention. In such pharmaceutical compositions, the active ingredient may be combined with other therapeutically active ingredients or inactive ingredients (e.g., conventional pharmaceutically acceptable carriers or diluents such as immunogenic adjuvants) and physiologically non-toxic stabilizers and excipients. The resulting combinations can be sterilized by filtration, and formulated into vials after lyophilization or into various dosage forms in stabilized and preservable aqueous preparations. Administration to a patient can be intra-arterial administration, intravenous administration and subcutaneous administration, which are well known to those skilled in the art. The dosage range depends upon the weight and age of the patient, route of administration and the like. Suitable dosages can be determined by those skilled in the art. These antibodies exhibit therapeutic activity by inhibiting the NF-κB activation mediated by the protein of the present invention.

[0168] The DNA of the present invention can also be used to isolate, identify and clone other proteins involved in intracellular signal transduction processes. For example, the DNA sequence encoding the protein of the present invention can be used as a “bait” in yeast two-hybrid systems (see e.g., Nature 340:245-246 (1989)) to isolate and clone the sequence encoding a protein (“prey”) which can associate with the protein of the present invention. In a similar manner, it can be determined whether the protein of the present invention can associate with other cellular proteins (e.g., NIK and TRAF2). In another method, proteins which can associate with the protein of the present invention can be isolated from cell extracts by immunoprecipitation [see e.g., “Shin Idenshi Kougaku Handbook (New Genetic Engineering Handbook)”, an extra issue of “Jikken Igaku (Experimental Medicine)”, YODOSHA CO., LTD.] using antibodies directed against the protein of the present invention. In still another method, the protein of the present invention can be expressed as a fusion protein with another protein as described above, and immunoprecipitated with an antibody directed against the fusion protein in order to isolate a protein which can associate with the protein of the present invention.

[0169] The diagnostic assays offer a process for diagnosing diseases or determining a susceptibility to the diseases through detection of mutation in a gene for a protein according to item (1), (2) or (7) which has a function of activating NF-κB, by the methods described. In addition, such diseases may be diagnosised by methods comprising determining from a sample derived from a subject an abnormally decreased or increased level of protein or mRNA. Decreased or increased expression can be measured at the RNA level using any of the methods well known in the art for the quantitation of polynucleotides, for example, nucleic acid amplification methods such as RT-PCR, and methods such as RNase protection assay, Northern blotting and other hybridization methods. Assay techniques that can be used to determine levels of a protein in a sample derived from a host are well-known to those skilled in the art. Such assay methods include radioimmunoassays, competitive-binding assays, Western blot analysis and ELISA assays. The DNA of the present invention can be used to detect abnormality in the DNA or mRNA encoding the protein of the present invention or a peptide fragment thereof. The invention relates to a method for diagnosing a disease, or susceptibility to a disease associated with the expression of the protein according to above item (1), (2) or (7) in a subject, which comprises determining mutations in the polynucleotide sequence encoding the protein. Thus, for example, the DNA of the present invention is useful for gene diagnosis regarding damage, mutations, and reduced, increased or over-expression of the DNA or mRNA. That is, the present invention includes a method for diagnosing a disease or susceptibility to a disease associated with the expression or activity of NF-κB in a subject, which comprises the steps of:

[0170] (a) determining the presence or absence of a mutation in the nucleotide sequence encoding the protein according to any one of claims 1, 2 or 7, in the genome of the subject, and/or

[0171] (b) analyzing the amount of expression of said protein in a sample derived from said subject, wherein a diagnosis of disease is preferably made when the amount of the protein expressed is 2-fold or higher than normal, or half or lower than normal.

[0172] When the nucleotide sequence encoding the protein of above item (1), (2) or (7) which has a function of activating NF-κB, contains a mutation according to the above step (a), the mutation may cause a disease associated with NF-κB activation. When the amount of the expression of the protein of above item (1), (2) or (7) is different from the normal value according to the above step (b), the abnormal expression of the novel protein of the present invention which acts to activate NF-κB may be responsible for diseases associated with NF-κB activation. In the above step (a), determination of the presence or absence of a mutation in the nucleotide seqeunce of a the gene encoding the protein of above item (1), (2) or (7) which has a function of activating NF-κB, may involve RT-PCR using a part of the nucleotide sequences of genes encoding these proteins as a primer, followed by conventional DNA sequencing to detect the presence or absence of the mutation. PCR-SSCP [Genomics 5:874-879 (1989); “Shin Idenshi Kougaku Handbook (New Genetic Engineering Handbook)”, an extra issue of “Jikken Igaku (Experimental Medicine)”, YODOSHA CO., LTD.] can also be used to determine the presence or absence of the mutation.

[0173] Measurement of the amount of the expression of the protein in the above step (b) may involve, for example, using the antibody of above item (16).

[0174] The present invention also relates to a method for screening compounds which inhibit or promote NF-κB activation using the proteins of the invention, which comprises the steps of:

[0175] (a) providing a cell with a gene encoding a protein that activates NF-κB, and a component that provides a detectable signal upon activation of NF-κB;

[0176] (b) culturing the transformed cell under conditions, which permit the expression of the gene in the transformed cell;

[0177] (c) contacting the transformed cell with one or more compounds; and

[0178] (d) measuring the detectable signal; and

[0179] (e) isolating or identifying an activator compound and/or an inhibitor compound by measuring the detectable signal.

[0180] Further, it is preferable to isolate or identify as an activator compound, a compound that increases said detectable signal 2-fold or higher than normal, and to isolate or identify as an inhibitor compound, a compound that decreases said detectable signal half or less than normal.

[0181] Examples of components capable of providing a detectable signal include reporter genes. Reporter genes are used instead of directly detecting the activation of transcription factors of interest. The transcriptional activity of a promoter of a gene is analyzed by linking the promoter to a reporter gene and measuring the activity of the product of the reporter gene (“Bio Manual Series 4” (1994), YODOSHA CO., LTD.).

[0182] Any peptide or protein can be used so long as those skilled in the art can measure the activity or amount of the expression product (including the amount of the produced mRNA) of the reporter genes. For example, enzymatic activity of chloramphenicol acetyltransferase, β-galactosidase, luciferase, etc., can be measured. Any reporter plasmids can be used to evaluate NF-κB activation so long as the reporter plasmids have an NF-κB recognition sequence inserted upstream of the reporter gene. For example, pNF-κB-Luc (STRATAGENE) can be used. Other examples include NF-κB dependent reporter plasmids described in Tanaka S. et al., J. Vet. Med. Sci. Vol.59 (7); Rothe M. et al., Science Vol.269, p.1424-1427 (1995).

[0183] Any host cells may be used so long as NF-κB activation can be detected in the host cells. Preferred host cells are mammalian cells such as 293-EBNA cells. Transformation and culture of the cells can be carried out as described above.

[0184] In a specific embodiment, the method for screening a compound which inhibits or promotes NF-κB activation comprises culturing the transformed cell for a certain period of time, adding a certain amount of a test compound, measuring the reporter activity expressed by the cell after a certain period of time, and comparing the activity with that of a cell to which the test compound has not been added. The reporter activity can be measured by methods known in the art (see e.g., “Bio Manual Series 4” (1994), YODOSHA CO., LTD.). Examples of test compounds include, but not limited to, low molecular weight compounds and peptides. Test compounds may be artificially synthesized compounds or naturally occurring compounds. Test compounds may be a single compound or mixtures. Examples of such detectable signals which may be measured include the amount of mRNA or proteins for genes whose expression is known to be induced by NF-κB activation (e.g., genes for IL-1 and TNF-α) in addition to the above reporter genes. The amount of mRNA can be measured, for example, by northern hybridization, RT-PCR, etc. The amount of proteins can be measured, for example, by using antibodies. The antibodies may be produced by known methods. Commercially available antibodies(from, e.g., Wako Pure Chemical Industries, Ltd.) can also be used.

[0185] It is also possible to produce a pharmaceutical composition according to the following steps (a) to (f):

[0186] (a) providing a cell with a gene encoding a protein that activates NF-κB, and a component that provides a detectable signal upon activation of NF-κB;

[0187] (b) culturing the transformed cell under conditions, which permit the expression of the gene in the transformed cell;

[0188] (c) contacting the transformed cell with one or more candidate compounds;

[0189] (d) measuring the detectable signal;

[0190] (e) isolating or identifying an activator compound and/or an inhibitor compound by measuring the detectable signal; and

[0191] (f) optimizing the isolated or identified compound as a pharmaceutical composition.

[0192] Further, it is preferable to isolate or identify as an activator compound, a compound that increases said detectable signal 2-fold or higher than normal, and to isolate or identify as an inhibitor compound, a compound that decreases said detectable signal half or less than normal.

[0193] The protein of the present invention may also be used in a method for the structure-based design of an agonist, antagonist or inhibitor of the protein, by:

[0194] (a) determining in the first instance the three-dimensional structure of the protein;

[0195] (b) deducing the three-dimensional structure for the likely reactive or binding site(s) of an agonist, antagonist or inhibitor;

[0196] (c) synthesising candidate compounds that are predicted to bind to or react with the deduced binding or reactive site; and

[0197] (d) testing whether the candidate compounds are indeed agonists, antagonists or inhibitor.

[0198] The present invention also includes a compound obtainable by the above screening method. However, the screening method of the present invention is not limited to the above method. The present invention also includes a process for producing the pharmaceutical composition by the method of above item (14).

[0199] There is no special limitation to the above candidate compounds. Such compounds include low molecular weight compounds and peptides. They may be artificially synthesised compounds and naturally occurring compounds. As the compounds obtained by the above screening methods have a function of inhibiting or promoting NF-κB activation, they are useful as therapeutic or preventive pharmaceuticals for the treatment of diseases resulting from unfavorable activation or inactivation of NF-κB. In order to isolate and purify the target compounds from the mixture, it is suitable to combine the known methods such as filtration, extraction, washings, drying, concentration, crystallization,various chromatography. When obtainment of a salt of the compounds is desired, a compound which is obtained in the form of a salt can be purified as it is. A compound which is obtained in the free form can be converted into a salt by isolating and purifying a salt obtained by dispersing or dissolving the compound into a suitable solvent and then adding a desired acid or base. Examples of a step to optimize the compounds or salts thereof obtained by the method of the present invention as a pharmaceutical composition, include methods of formulating according to ordinary processes such as the following. The above compounds or their pharmaceutically acceptable salts in an amount effective as an active ingredient, and pharmaceutically acceptable carriers can be mixed. A form of formulation suitable for the mode of administration is selected. A composition suitable for oral administration includes a solid form such as tablet, granule, capsule, pill and powder, and solution form such as solution, syrup, elixir and dispersion. A form useful for parenteral administration includes sterile solution, dispersion, emulsion and suspension. The above carriers include, for example, sugars such as gelatin, lactose and glucose, starches such as corn, wheat, rice and maize, fatty acids such as stearic acid, salts of fatty acids such as calcium stearate, magnesium stearate, talc, vegetable oil,alcohol such as stearyl alcohol and benzyl alcohol, gum, and polyalkylene glycol. Examples of such liquid carriers include generally water, saline, sugar solution of dextrose and the lile, glycols such as ethylene glycol, propylene glycol and polyethylene glycol.

[0200] The present invention also includes a kit for screening compounds for activity to inhibit or promote NF-κB activation. The kit comprises reagents and the like necessary for screening compounds for inhibiting or promoting activity for NF-κB activation, including:

[0201] (a) a cell comprising a gene encoding a protein that activates NF-κB, and a component thst provides a detectable signal enabling detection of NF-κB activation after activation of NF-κB; and

[0202] (b) reagents for measuring the detectable signal.

[0203] In another aspect, the present invention relates to a diagnostic kit which comprises:

[0204] (a) a polynucleotide of the present invention having a nucleotide sequence expressed by SEQ ID NO: 2, 4, 6, 8, 10, 12, 14, 16, 18, 20, 22, 24, 26, 28, 30, 32, 34, 36, 38, 40, 42, 44, 46, 48, 50, 52, 54, 56, 58, 60, 62, 64, 66, 68, 70, 72, 74, 76, 78, 80, 82, 84, 86, 88, 90, 92, 94, 96, 98, 100, 102, 104, 106, 108, 110, 112, 114, 116, 118, 120, 122, 124, 126, 128, 130, 132, 134, 136, 138, 140, 142, 144, 146, 148, 150, 151, 153, 155, 157, 159, 161, 163, 165, 167, 169, 171, 173, 175, 177 or 179;

[0205] (b) a nucleotide sequence complementary to that of (a);

[0206] (c) a protein of the present invention having an amino acid seqeunce expressed by SEQ ID NO: 1, 3, 5, 7, 9, 11, 13, 15, 17, 19, 21, 23, 25, 27, 29, 31, 33, 35, 37, 39, 41, 43, 45, 47, 49, 51, 53, 55, 57, 59, 61, 63, 65, 67, 69, 71, 73, 75, 77, 79, 81, 83, 85, 87, 89, 91, 93, 95, 97, 99, 101, 103, 105, 107, 109, 111, 113, 115, 117, 119, 121, 123, 125, 127, 129, 131, 133, 135, 137, 139, 141, 143, 145, 147, 149, 152, 154, 156, 158, 160, 162, 164, 166, 168, 170, 172, 174, 176, 178 or 180, or a fragment thereof; or

[0207] (d) an antibody to the protein of the present invention of (c).

[0208] A kit comprising at least one of (a) to (d) is useful for diagnosing a disease or susceptibility to a disease such as inflammation, autoimmune diseases, infectious diseases (e.g., HIV infection) and cancers.

[0209] Because NF-κB is involved in a wide variety of pathological conditions such as inflammation, autoimmune diseases, cancers and viral infections, it is an attractive target for drug design and therapeutic intervention. Many experiments show that NF-κB activity may have significant physiological effects [see e.g., Ann. Rheum. Ds. 57:738-741 (1998); American Journal of Pathology 152:793-803 (1998); ARTHRITIS & RHEUMATISM 40:226-236 (1997); Am. J. Respir. Crit. Care Med. 158:1585-1592 (1998); J. Exp. Med. 188:1739-1750 (1998); Gut 42:477-484 (1998); The Journal of Immunology 161:4572-4582 (1998); Nature Medicine 3:894-899 (1997)]. The finding of the new protein described herein capable of activating NF-κB has provided a new method for controlling an abnormal NF-κB function. Thus, the present invention also relates to use of a compound which inhibits the function of the protein capable of activating NF-κB described above, for inhibiting NF-κB activation. Further, the present invention relates to a method of using a compound which activates the function of the protein capable of activating NF-κB described above, for promoting NF-κB activation. The compound obtained by the above screening method, which inhibits NF-κB activation, is useful as a medicament to treat or prevent diseases characterized by undesirable activation of NF-κB, such as inflammation, autoimmune diseases (such as rheumatoid arthritis, systemic lupus erythematosus, asthma, etc), infectious diseases, bone diseases, and graft rejection. Recently, it has also become apparent that NF-κB activation controls apoptosis of cells. The compound obtained by the above screening method, which inhibits NF-κB activation, may be capable of stimulating apoptosis. Diseases which may be treated by the induction of apoptosis include tumors.

[0210] Further, examples of diseases related to abnormality in NF-κB activation include AIDS (acquired immunodeficiency syndrome), neurodegenerative diseases (Alzheimer's disease, Parkinson's disease, amyotrophic lateral sclerosis, etc.) ischemic disorders (i.e. those caused by cardiac infarction, reperfusion injury, etc), myelogenesis incompetency syndrome (aplastic anemia, etc), skin diseases (Toxic epidermal necrolysis, etc), proliferative nephritis (IgA nephritis, purpuric nephritis, lupus nephritis, etc) and fulminant hepatitis. Thus, a compound obtained by the above screening method, which inhibits or promotes NF-κB activation, is useful as a medicament to treat or prevent these diseases.

[0211] In addition, the gene encoding the protein of the present invention is useful for gene therapy to treat various diseases such as cancers, autoimmune diseases, allergy diseases and inflammatory response. “Gene therapy” refers to administering into the human body a gene or a cell into which a gene has been introduced. The protein of the present invention and the DNA encoding the protein can also be used for diagnostic purposes.

[0212] The compound obtained by the screening method of the present invention or a salt thereof can be formulated into the above pharmaceutical compositions (e.g., tablets, capsules, elixirs, microcapsules, sterile solutions and suspensions) according to conventional procedures. The formulations thus obtained are safe and of low toxicity, and can be administered, for example, to humans and mammals (e.g., rats, rabbits, sheep, pigs, cattle, cats, dogs and monkeys). Administration to patients can be carried out by methods known in the art, such as intra-arterial injection, intravenous injection and subcutaneous injection. The dosage may vary with the weight and age of the patient as well as a mode of administration, but those skilled in the art can appropriately select suitable dosages. When the compound can be encoded by DNA, the DNA can be inserted into a vector for gene therapy, and gene therapy can be carried out. The dosage and mode of administration may vary with the weight, age and symptoms of the patient, but those skilled in the art can appropriately select them. Thus, the present invention also relates to a pharmaceutical composition which comprises the above compound as an active ingredient.

[0213] In addition, the above compound is useful as a medicament to treat or prevent diseases characterized by abnormal NF-κB activity, such as inflammation, autoimmune diseases, viral diseases, infectious diseases, cancers and bone diseases. Thus, the present invention also relates to a pharmaceutical composition for inflammation, autoimmune diseases, viral diseases, infectious diseases, cancers, bone diseases, etc., which comprises the above compound. Specifically, the compound is useful as a therapeutic and/or prophylactic drug against, for example, rheumatoid arthritis, osteoarthritis, systemic lupus erythematosus, diabetes, sepsis, asthma, allergic rhinitis, ischemic heart diseases, inflammatory intestinal diseases, subarachnoid hemorrhage, viral hepatitis, AIDS, atherosclerosis, atopic dermatosis, viral infections, Crohn's disease, diabetes, gout, hepatitis, multiple sclerosis, cardiac infarction, nephritis, osteoporosis, Alzheimer's, Parkinson's disease, Huntington's chorea, psoriasis, amyotrophic lateral sclerosis, or aplastic anemia.

[0214] The present invention also relates to the use of a pharmaceutical composition produced according to above item (14) for manufacturing a medicament against inflammation, autoimmune diseases, viral diseases, cancers, infectious diseases, bone diseases, etc. The present invention also includes an antisense oligonucleotide against a gene of any one of above items (3) to (6). An antisense oligonucleotide refers to an oligonucleotide complementary to the target gene sequence. The antisense oligonucleotide can inhibit the expression of the target gene by inhibiting RNA functions such as translation to proteins, transport to the cytoplasm and other activity necessary for overall biological functions. In this case, the antisense oligonucleotide may be RNA or DNA. The DNA sequence of the present invention can be used to produce an antisense oligonucleotide capable of hybridizing with the mRNA transcribed from the gene encoding the protein of the present invention. It is known that an antisense oligonucleotide generally has an inhibitory effect on the expression of the corresponding gene (see e.g., Saibou Kougaku Vol.13, No.4 (1994)). The oligonucleotide containing an antisense coding sequence against a gene encoding the protein of the present invention can be introduced into a cell by standard methods. The oligonucleotide effectively blocks the translation of mRNA of the gene encoding the protein of the present invention, thereby blocking its expression and inhibiting undesirable activity.

[0215] The oligonucleotide of the present invention may be a naturally occurring oligonucleotide or its modified form [see e.g., Murakami & Makino, Saibou Kougaku Vol.13, No.4, p.259-266 (1994); Akira Murakami, Tanpakushitsu Kakusan Kouso (PROTEIN, NUCLEIC ACID AND ENZYME) Vol.40, No.10, p.1364-1370 (1995),Tunenari Takeuchi et al., Jikken Igaku (Experimental Medicine) Vol. 14, No. 4 p85-95(1996)]. Thus, the oligonucleotide may have modified sugar moieties or inter-sugar moieties. Examples of such modified forms include phosphothioates and other sulfur-containing species used in the art. According to several preferred embodiments of the present invention, at least one phosphodiester bond in the oligonucleotide is substituted with the structure which can enhance the ability of the composition to permeate cellular regions where RNA with the activity to be regulated is located.

[0216] Such substitution preferably involves a phosphorothioate bond, a phosphoramidate bond, methylphosphonate bond, or a short-chain alkyl or cycloalkyl structure. The oligonucleotide may also contain at least some modified base forms. Thus, it may contain purine and pyrimidine derivatives other than naturally occurring purine and pyrirnidine. Similarly, the furanosyl moieties of the nucleotide subunits can be modified so long as the essential purpose of the present invention is attained. Examples of such modifications include 2′-O-alkyl and 2′-halogen substituted nucleotides. Examples of modifications in sugar moieties at their 2-position include OH, SH, SCH₃, OCH₃, OCN or O(CH₂)ₙCH₃, wherein n is 1 to about 10, and other substituents having similar properties. All the analogues are included in the scope of the present invention so long as they can hybridize with the mRNA of the gene of the present invention to inhibit functions of the mRNA.

[0217] The oligonucleotide of the present invention contains about 3 to about 50 nucleotides, preferably about 8 to about 30 nucleotides, more preferably about 12 to about 25 nucleotides. The oligonucleotide of the present invention can be produced by the well-known solid phase synthesis technique. Devices for such synthesis are commercially available from some manufactures including Applied Biosystems. Other oligonucleotides such as phosphothioates can also be produced by methods known in the art.

[0218] The oligonucleotide of the present invention is designed to hybridize with the mRNA transcribed from the gene of the present invention. Those skilled in the art can easily design an antisense oligonucleotides based on a given gene sequence (For example, Murakami and Makino: Saibou Kougaku Vol. 13 No.4 p259-266 (1994), Akira Murakami: Tanpakushitsu Kakusan Kouso (PROTEIN, NUCLEIC ACID AND ENZYME) Vol. 40 No.10 p1364-1370 (1995), Tunenari Takeuchi et al., Jikken Igaku (Experimental Medicine) Vol. 14 No. 4 p85-95 (1996)). Recent study suggests that antisense oligonucleotides which are designed in a region containing 5′ region of mRNA, preferably,the translation initiation site,are most effective for the inhibition of the expression of a gene.The length of the antisense oligonucleotides is preferably 15 to 30 nucleotides and more preferably 20 to 25 nucleotides. It is important to confirm no interaction with other mRNA and no formation of secondary structure in the oligonucleotide sequence by homology search. The evaluation of whether the designed antisense oligonucleotide is functional or not can be determined by introducing the antisence oligonucleotide into a suitable cell and measuring the amount of the target mRNA, for example by northern blotting or RT-PCR, or the amount of the target protein, for example by western blotting or fluorescent antibody technique, to confirm the effect of expression inhibition.

[0219] Another method includes the triple helix technique. This technique involves forming a triple helix on the targeted intra-nuclear DNA sequence, thereby regulating its gene expression, mainly at the transcription stage. The oligonucleotide is designed mainly in the gene region involved in the transcription and inhibits the transcription and the production of the protein of the present invention. Such RNA, DNA and oligonucleotide can be produced using known synthesizers.

[0220] The oligonucleotide may be introduced into the cells containing the target nucleic acid sequence by any of DNA transfection methods such as calcium phosphate method, electroporation,lipofection, microinjection, or gene transfer methods including the use of gene transfer vectors such as viruses. An antisense oligonucleotide expression vector can be prepared using a suitable retrovirus vector, then the expression vector can be introduced into the cells containing the target nucleic acid sequence by contacting the vector with the cells in vivo or ex vivo.

[0221] The DNA of the present invention can be used in the antisense RNA/DNA technique or the triple helix technique to inhibit NF-κB activation mediated by the protein of the present invention.

[0222] The antisense oligonucleotide against the gene encoding the protein of the present invention is useful as a medicament to treat or prevent diseases characterized by undesirable activation of NF-κB, such as inflammation, autoimmune diseases, infectious diseases (e.g., HIV infection) and cancers. Thus, the present invention also includes a pharmaceutical composition which comprises the above antisense oligonucleotide as an active ingredient. The antisense oligonucleotide can also be used to detect such diseases using northern hybridization or PCR.

[0223] The present invention also includes a ribozyme which inhibits NF-κB activation. A ribozyme is an RNA capable of recognizing a nucleotide sequence of a nucleic acid and cleaving the nucleic acid (see e.g., Hiroshi Yanagawa, “Jikken Igaku (Experimental Medicine) Bioscience 12: New Age of RNA). The ribozyme can be produced so that it cleaves the selected target RNA (e.g., mRNA encoding the protein of the present invention). Based on the nucleotide sequence of the DNA encoding the protein of the present invention, the ribozyme specifically cleaving the mRNA of the protein of the present invention can be designed. Such ribozyme has a complementary sequence to the mRNA for the protein of the present invention, complementarily associates with the mRNA and then cleaves the mRNA, which results in reduction or entire loss of the expression of the protein of the present invention. The level of the reduction of the expression is dependent on the level of the ribozyme expression in the target cells.

[0224] There are two types of ribozyme commonly used: a hammerhead ribozyme and a hairpin ribozyme. In particular, hammerhead ribozymes have been well studied regarding their primary and secondary structure necessary for their cleavage activity, and those skilled in the art can easily design the ribozymes nucleotided solely on the nucleotide sequence information for the DNA encoding the protein of the present invention [see e.g., lida et al., Saibou Kougaku Vol.16, No.3, p.438-445 (1997); Ohkawa & Taira, Jikken Igaku (Experimental Medicine) Vol.12, No.12, p.83-88 (1994)]. It is known that the hammerhead ribozymes have a structure consisting of two recognition sites (recognition site I and recognition site II forming a chain complementary to target RNA) and an active site, and cleave the target RNA at the 3′ end of its sequence NUX (wherein N is A or G or C or U, and X is A or C or U)after the formation of a complementary pair with the target RNA in the recognition sites. In particular, the sequence GUC (or GUA) has been found to have the highest activity [see e.g., Koizuii, M. et al., Nucl. Acids Res. 17:7059-7071 (1989); lida et al., Saibou Kougaku Vol.16, No.3, p.438-445 (1997); Ohkawa & Taira, Jikken Igaku (Experimental Medicine) Vol.12, No.12, p.83-88 (1994); Kawasaki & Taira, Jikken Igaku (Experimental Medicine) Vol.18, No.3, p.381-386 (2000)].

[0225] Therefore the sequence GTC (or GTA) is searched out, and a ribozyme is designed to form several,up to 10 to 20 complementary base pairs around that sequence. The suitability of the designed ribozyme can be evaluated by checking whether the prepared ribozyme can cleave the target mRNA in vitro according to the method described for example in Ohkawa & Taira, Jikken Igaku (Experimental Medicine) Vol.12, No.12, p.83-88 (1994). The ribozyme can be prepared by methods known in the art to synthesize RNA molecules.

[0226] Alternatively, the sequence of the ribozyme can be synthesized on a DNA synthesizer and inserted into various vectors containing a suitable RNA polymerase promoter (e.g., T7 or SP6) to enzymatically synthesize an RNA molecule in vitro. Such ribozymes can be introduced into cells by gene transfer methods such as microinjection. Another method involves inserting a ribozyme DNA into a suitable expression vector and introducing the vector into cell strains, cells or tissues. Suitable vectors can be used to introduce the ribozyme into a selected cell. Examples of vectors commonly used for such purpose include plasmid vectors and animal virus vectors (e.g., retrovirus, adenovirus, herpes or vaccinia virus vectors). Such ribozymes are capable of inhibiting the NF-κB activation mediated by the protein of the present invention.

[0227] The present invention, moreover, relates to a process for obtaining a new gene having a function, which comprises using the oligo-capping method to construct a full-length cDNA library, and using a signal factor indicative of the presence of a protein having the function. An example of such signal factor is a reporter gene.

[0228] Methods using a cDNA library containing a lot of non-full-length cDNAs are inefficient in obtaining many genes (cDNAs) having functions. Therefore libraries with a high ratio of the number of the full-length cDNA clones to the total number of the clones are necessary. “Full-length cDNA” refers to a complete DNA copy of mRNA from a gene. The cDNA libraries produced using the oligo-capping method contain full-length cDNA clones in a ratio of 50 to 80%, namely, a 5 to 10-fold increase in full-length cDNA clones compared to the cDNA libraries produced by prior art methods (Sumio Sugano, the monthly magazine BIO INDUSTRY Vol.16, No.11, p.19-26). Full-length cDNA clones are essential for protein expression in functional analyses of genes, and full-length cDNA clones themselves are very important materials for activity measurement. Thus, cloning of full-length cDNA is necessary for functional analyses of genes. Sequencing of the cDNA not only provides important information for establishing the primary sequence of the protein encoded by the cDNA, but also reveals the entire exon sequence. Thus, the full-length cDNA provides valuable information for identifying a gene, such as information for determining the primary sequence of a protein, exon-intron structure, the transcription initiation site of mRNA, the location of a promoter, etc.

[0229] The construction of full-length cDNA libraries by the oligo-capping method can be carried out, for example, according to the method described in “Shin Idenshi Kougaku Handbook (New Genetic Engineering Handbook)”, the third edition (1999), an extra issue of “Jikken Igaku (Experimental Medicine)”, YODOSHA CO., LTD. The reporter gene indicative of the presence of a protein having a function contains one or more suitable expression regulation sequence portion to which a protein factor such as a transcriptional factor can bind, and a structural gene portion which allows the measurement of the activation of the proteins factor. The structural gene portion may encode any peptide or protein so long as those skilled in the art can measure the activity or amount of its expression product (including the amount of the mRNA produced). For example, chloramphenicol acetyltransferase, β-galactosidase, luciferase, etc., can be used and their enzymatic activity measured.

[0230] The oligo-capping method used herein involves substituting a cap structure with a synthetic oligo sequence by using BAP, TAP and an RNA ligase, as described in Suzuki & Sugano, “Shin Idenshi Kougaku Handbook (New Genetic Engineering Handbook)”, the third edition (1999), an extra issue of “Jikken Igaku (Experimental Medicine)”, YODOSHA CO., LTD.

[0231] The process of the present invention uses an in vitro system or a cell-based system, preferably a cell-based system. Examples of such cells include cells of prokaryotes such as E. coli, microorganisms such as yeast and fungi, as well as insects and animals. Preferred examples include animal cells, in particular, 293-EBNA cells and NIH3T3 cells.

[0232] Examples of reporter genes indicative of the presence of a protein having a function include reporter genes containing a CREB (cAMP responsive element binding protein) binding sequence or AP-1 (activator protein-1) binding sequence at the expression regulation sequence region of the reporter genes, in addition to the NF-κB reporter genes described herein. For example, if a gene capable of activating CREB is to be obtained, a CREB-dependent reporter plasmid and an expression vector comprising full-length cDNA produced by the oligo-capping method can be cotransfected into cells, and an expression vector having increased reporter activity can be selected from the cells to attain the purpose. If a gene capable of inhibiting CREB is to be obtained, a CREB-dependent reporter plasmid and an expression vector comprising full-length cDNA produced by the oligo-capping method can be cotransfected into cells, and an expression vector having decreased reporter activity can be selected from the cells to attain the purpose. These procedures may be carried out in the presence of a certain stimulus to the cells. The cDNA clone (expression vector) to be transfected into the cells may be a single clone or multiple clones which may be transfected simultaneously. One embodiment of the process of the present invention is detailed in Examples herein. Alternatively, a screening system for obtaining a gene capable of inhibiting NF-κB activation can also be constructed by cotransfecting an expression vector comprising full-length cDNA and a reporter gene into cells, stimulating the cells with IL-1 or TNF-α and the like, and selecting a clone having subnormally increased reporter activity.

[0233] However, the process of the present invention is not limited to these embodiments.

[0234] Because the cDNA of the present invention is full-length, its 5′ end sequence is the transcription initiation site of the corresponding mRNA. Therefore the cDNA sequence can be used to identify the promoter region of the gene by comparing the cDNA with the genomic nucleotide sequence. Genomic nucleotide sequences are available from various databases when the sequences have been deposited in the databases. Alternatively, the cDNA can also be used to clone the desired sequence from a genomic library, for example, by hybridization, and determine its nucleotide sequence. Thus, by comparing the nucleotide sequence of the cDNA of the present invention with a genomic sequence, the promoter region of the gene located upstream the cDNA can be identified. In addition, the promoter fragment thus identified can be used to construct a reporter plasmid for evaluating the expression of the gene. In general, the DNA fragment spanning 2 kb (preferably 1 kb) upstream from the transcription initiation site can be inserted upstream of the reporter gene to produce the reporter plasmid. The reporter plasmid can be used to screen for a compound which enhances or reduces the expression of the gene. For example, such screening can be carried out by transforming a suitable cell with the reporter plasmid, culturing the transformed cell for a certain period of time, adding a certain amount of a test compound, measuring the reporter activity expressed by the cell after a certain period of time, and comparing the activity with that of a cell to which the test compound has not been added. These methods are also included in the scope of the present invention.

[0235] The present invention also relates to a computer-readable medium on which a sequence data set has been stored, said sequence data set comprising at least one nucleotide sequence selected from the group consisting of SEQ ID NOS: 2, 4, 6, 8, 10, 12, 14, 16, 18, 20, 22, 24, 26, 28, 30, 32, 34, 36, 38, 40, 42, 44, 46, 48, 50, 52, 54, 56, 58, 60, 62, 64, 66, 68, 70, 72, 74, 76, 78, 80, 82, 84, 86, 88, 90, 92, 94, 96, 98, 100, 102, 104, 106, 108, 110, 112, 114, 116, 118, 120, 122, 124, 126, 128, 130, 132, 134, 136, 138, 140, 142, 144, 146, 148, 150, 151, 153, 155, 157, 159, 161, 163, 165, 167, 169, 171, 173, 175, 177 and 179, and/or at least one amino acid sequence selected from the group consisting of SEQ ID NOS: 1, 3, 5, 7, 9, 11, 13, 15, 17, 19, 21, 23, 25, 27, 29, 31, 33, 35, 37, 39, 41, 43, 45, 47, 49, 51, 53, 55, 57, 59, 61, 63, 65, 67, 69, 71, 73, 75, 77, 79, 81, 83, 85, 87, 89, 91, 93, 95, 97, 99, 101, 103, 105, 107, 109, 111, 113, 115, 117, 119, 121, 123, 125, 127, 129, 131, 133, 135, 137, 139, 141, 143, 145, 147, 149, 152, 154, 156, 158, 160, 162, 164, 166, 168, 170, 172, 174, 176, 178 and 180.

[0236] In another aspect, the present invention relates to a method for calculating a homology, which comprises comparing data on the above medium with data of other nucleotide sequences. Thus, the gene and amino acid sequence of the present invention provide valuable information for determining their secondary and tertiary structure, e.g., information for identifying other sequence having a similar function and high homology. These sequences are stored on the computer-readable medium, then a database is searched using data stored in a known macromolecule structure program and a known search tool such as GCG. In this manner, a sequence in a database having a certain homology can be easily found.

[0237] The computer-readable medium may be any composition of materials used to store information or data. Examples of such media include commercially available floppy disks, tapes, chips, hard drives, compact disks and video disks. The data on the medium allows a method for calculating a homology by comparing the data with other nucleotide sequence data. This method comprises the steps of providing a first polynucleotide sequence containing the polynucleotide sequence of the present invention for the computer-readable medium, and then comparing the first polynucleotide sequence with at least one-second polynucleotide or polypeptide sequence to identify the homology.

[0238] The present invention also relates to an insoluble substrate to which polynucleotide comprising all or part of the nucleotide sequences selected from the group consisting of SEQ ID NOS: 2, 4, 6, 8, 10, 12, 14, 16, 18, 20, 22, 24, 26, 28, 30, 32, 34, 36, 38, 40, 42, 44, 46, 48, 50, 52, 54, 56, 58, 60, 62, 64, 66, 68, 70, 72, 74, 76, 78, 80, 82, 84, 86, 88, 90, 92, 94, 96, 98, 100, 102, 104, 106, 108, 110, 112, 114, 116, 118, 120, 122, 124, 126, 128, 130, 132, 134, 136, 138, 140, 142, 144, 146, 148, 150, 151, 153, 155, 157, 159, 161, 163, 165, 167, 169, 171, 173, 175, 177 and 179, are fixed. A plurality of the various polynucleotides which are DNA probes are fixed on a specifically processed solid substrate such as slide glass to form a DNA microarray and then a labeled target polynucleotide is hybridized with the fixed polynucleotides to detect a signal from each of the probes. The data obtained is analyzed and the gene expression is determined.

[0239] The present invention further relates to an insoluble substrate to which polypeptides comprising all or part of the amino acid sequences selected from the group consisting of SEQ ID NOS: 1, 3, 5, 7, 9, 11, 13, 15, 17, 19, 21, 23, 25, 27, 29, 31, 33, 35, 37, 39, 41, 43, 45, 47, 49, 51, 53, 55, 57, 59, 61, 63, 65, 67, 69, 71, 73, 75, 77, 79, 81, 83, 85, 87, 89, 91, 93, 95, 97, 99, 101, 103, 105, 107, 109, 111, 113, 115, 117, 119, 121, 123, 125, 127, 129, 131, 133, 135, 137, 139, 141, 143, 145, 147, 149, 152, 154, 156, 158, 160, 162, 164, 166, 168, 170, 172, 174, 176, 178 and 180, are fixed. By mixing organism-derived cell extract with the insoluble substrate on which these proteins are fixed, it is possible to isolate or identify cell-derived components such as proteins captured on the insoluble substrate that can be expected to be useful in diagnosis or drug development.

### EXAMPLES

[0240] The following examples further illustrate, but do not limit the present invention.

### Example 1

### Construction of a Full-Length cDNA Library using the Oligo-Capping Method

[0241] (1) Preparation of RNA from Human Lung Fibroblasts (Cryo NHLF)

[0242] Human lung fibroblasts (Cryo NHLF: purchased from Sanko Junyaku Co., Ltd.) were cultured according to the attached protocol. After repeating subculturing the cells to obtain fifty 10 cm dishes containing the resulting culture, the cells were recovered with a cell scraper. Then, total RNA was obtained from the recovered cells by using the RNA extraction reagent ISOGEN (purchased from NIPPON GENE) according to the manufacturer's protocol. Then, poly A⁺ RNA was obtained from the total RNA by using an oligo-dT cellulose column according to Maniatis et al., supra.

[0243] (2) Preparation of RNA from Mouse ATDC5 Cells

[0244] ATDC5, a cell strain cloned from mouse EC (embryonal carcinoma) (Atsumi, T. et al.: Cell Diff. Dev., 30: p109-116)(1990) was repeatedly subcultured to obtain fifty 10 cm dishes containing the resultant culture. Thereafter, poly A⁺ RNA was obtained by a method similar to that of (1) above. Culture of ATDC5 cells was performed according to the method described in Atsumi, T. et al.: Cell Diff. Dev., 30: p109-116 (1990).

[0245] (3) Construction of a Full-Length cDNA Library by the Oligo-Capping Method

[0246] A full-length cDNA library was constructed from poly A⁺ RNA of the above human lung fibroblasts and ATDC5 cells by the oligo-capping method according to the method of Sugano S. et al. [e.g., Maruyama, K. & Sugano, S., Gene, 138:171-174 (1994); Suzuki, Y. et al., Gene, 200:149-156 (1997); Suzuki, Y. & Sugano, S. “Shin Idenshi Kougaku Handbook (New Genetic Engineering Handbook)”, the third edition (1999), an extra issue of “Jikken Igaku (Experimental Medicine)”, YODOSHA CO., LTD.].

[0247] (4) Preparation of Plasmid DNA

[0248] The full-length cDNA library constructed as above was transfected into E. coli strain TOP 10 by electroporation, then spread on LB agar medium containing 100 μg/ml of ampicillin, and incubated overnight at 37° C. Then, using QLAwell 96 Ultra Plasmid Kit (QIAGEN) according to the manufacturer's protocol, the plasmids were recovered from the colonies grown on ampicillin-containing LB agar medium.

### Example 2

### Cloning of DNA Capable of Activating NF-κB

[0249] (1) Screening of the cDNA Encoding the Protein Capable of Activating NF-κB

[0250] 293-EBNA cells (purchased from Invitrogen) were grown to 1×10⁴ cells/100 μl/well in a 96 well plate for cell culture for 24 hours at 37° C. (in the presence of 5% CO₂) using 5% FBS containing DMEM medium. Then, 50 ng of pNFκB-Luc (purchased from STRATAGENE) and 2 μl of the full-length cDNA expression vector prepared in above Example 1.(4) were cotransfected into the cells in a well using FuGENE 6 (purchased from Roche) according to the manufacturer's protocol. After 24 hours of culture at 37° C., the reporter activity of NF-κB (luciferase activity) was measured using long-term luciferase assay system,PIKKA GENE LT2.0 (TOYO INK) according to the attached manufacturer's activity was measured using Wallac ARVO™ST 1420 MULTILABEL COUNTER (Perkin Elmer).

[0251] (2) DNA Sequencing

[0252] The above screening was carried out for 155,000 clones, and plasmids showing a 5-fold or more increase in luciferase activity compared to that of the control experiment (luciferase activity of the cell into which vacant vector pME18S-FL3 is introduced instead of full-length cDNA expression vector) were selected. One pass sequencing was carried out from the 5′ end of the cloned cDNA (sequencing primer: 5′-CTTCTGCTCTAAAAGCTGCG-3′ (SEQ ID NO: 181)) and from the 3′ end (sequencing primer: 5′-CGACCTGCAGCTCGAGCACA-3′ (SEQ ID NO: 182)) so that as long sequence as possible is determined. The sequencing was carried out using the reagent Thermo Sequenase II Dye Terminator Cycle Sequencing Kit (Amersham Pharmacia Biotech) or BigDye Terminator Cycle Sequencing FS Ready Reaction Kit (Applied Biosystems) and the device ABI PRISM 377 sequencer or ABI PRISM 3100 sequencer according to the manufacturer's instructions.

[0253] (3) Database Analysis of the Obtained Clones

[0254] BLAST (Basic local alignment search tool) searching [S. F. Altschul et al., J. Mol. Biol., 215:403-410 (1990)] was carried out in GenBank for the obtained nucleotide sequence. The results showed that 148 clones represented 90 genes encoding new proteins capable of activating NF-κB.

[0255] (4) Full-Length Sequencing

[0256] The full-length DNA sequences for the 90 new clones were determined (SEQ ID NOS: 2, 4, 6, 8, 10, 12, 14, 16, 18, 20, 22, 24, 26, 28, 30, 32, 34, 36, 38, 40, 42, 44, 46, 48, 50, 52, 54, 56, 58, 60, 62, 64, 66, 68, 70, 72, 74, 76, 78, 80, 82, 84, 86, 88, 90, 92, 94, 96, 98, 100, 102, 104, 106, 108, 110, 112, 114, 116, 118, 120, 122, 124, 126, 128, 130, 132, 134, 136, 138, 140, 142, 144, 146, 148, 150, 151, 153, 155, 157, 159, 161, 163, 165, 167, 169, 171, 173, 175, 177 and 179). The amino acid sequences of the protein coding regions (open reading frames) were deduced (SEQ ID NOS: 1, 3, 5, 7, 9, 11, 13, 15, 17, 19, 21, 23, 25, 27, 29, 31, 33, 35, 37, 39, 41, 43, 45, 47, 49, 51, 53, 55, 57, 59, 61, 63, 65, 67, 69, 71, 73, 75, 77, 79, 81, 83, 85, 87, 89, 91, 93, 95, 97, 99, 101, 103, 105, 107, 109, 111, 113, 115, 117, 119, 121, 123, 125, 127, 129, 131, 133, 135, 137, 139, 141, 143, 145, 147, 149, 152, 154, 156, 158, 160, 162, 164, 166, 168, 170, 172, 174, 176, 178 and 180).

### Example 3

### Screening Compounds Inhibiting NF-κB Activation

[0257] 293-EBNA cells were seeded on 5% FBS containing DMEM medium in a 96-well cell culture plate to a final cell density of 1×10⁴ cells/100 μl/well, and cultured for 24 hours at 37° C. in the presence of 5% CO₂. Then, 50 ng of the expression vector comprising the gene encoding NF-κB activating protein of SEQ ID NO: 5, 9, 17, 21, 35, 37, 41, 53, 57, 63, 67, 71, 75, 81, 87, 91, 93, 97, 121, 123, 129, 154, 158, 162, 168, 170, 172, 176 or 178, and 50 ng of the reporter plasmid pNFκB-Luc were cotransfected into the cells in a well using FuGENE 6. After 1 hour, the proteasome inhibitor MG-132 (purchased form CALBIOCHEM) (Uehara T. et al., J. Biol. Chem. 274, p.15875-15882 (1999); Wang X. C. et al., Invest. Ophathalmol. Vis. Sci. 40, p.477-486) was added to the culture to final concentrations of 0.1 μM , 0.5 μM , 1.0 μM and 10 μM, respectively. After 24 hours of culture at 37° C., the reporter activity was measured using PIKKA GENE LT2.0. The results showed that MG132 inhibited the expression of the reporter gene (FIG. 1 to FIG. 29).

[0258] Industrial Applicability

[0259] As described above, the present invention provides industrially highly useful proteins capable of activating NF-κB and genes encoding the proteins. The proteins of the present invention and the genes encoding the proteins allow not only screening for compounds useful for treating and preventing diseases associated with the excessive activation or inhibition of NF-κB, but also production of diagnostics for such diseases. The genes of the present invention are also useful as a gene source used for gene therapy.

[0260] All publications, patents and patent applications cited herein are incorporated herein in their entirety.

The application's sequence listing, which the Patent Office published only in electronic form, follows.

SEQUENCE LISTING (182 sequences)

SEQ ID NO: 1 - protein, 167 aa, Homo sapiens
MSGLITIVVLLGIAFVVYKLFLSDGQYSPPPYSEYPPFSHRYQRFTNSAGPPPPGFKSEFTGPQNTGHGATSGFGSAFTGQQGYENSGPGFWTGLGTGGILGYLFGSNRAATPFSDSWYYPSYPPSYPGTWNRAYSPLHGGSGSYSVCSNSDTKTRTASGYGGTRRR

SEQ ID NO: 2 - DNA, 1472 bp, Homo sapiens
  CDS (194)..(694)
aaaaactgtggtgagctgtgaaggctatgagtcctctgaagaccagtatgtactaagaggttcttgtggcttggagtataatttagattatacagaacttggcctgcagaaactgaaggagtctggaaagcagcacggctttgcctctttctctgattattattataagtggtcctcggcggattcctgtaacatgagtggattgattaccatcgtggtactccttgggatcgcctttgtagtctataagctgttcctgagtgacgggcagtattctcctccaccgtactctgagtatcctccattttcccaccgttaccagagattcaccaactcagcaggacctcctcccccaggctttaagtctgagttcacaggaccacagaatactggccatggtgcaacttctggttttggcagtgcttttacaggacaacaaggatatgaaaattcaggaccagggttctggacaggcttgggaactggtggaatactaggatatttgtttggcagcaatagagcggcaacacccttctcagactcgtggtactacccgtcctatcctccctcctaccctggcacgtggaatagggcttactcaccccttcatggaggctcgggcagctattcggtatgttcaaactcagacacgaaaaccagaactgcatcaggatatggtggtaccaggagacgataaagtagaaagttggagtcaaacactggatgcagaaattttggatttttcatcactttctctttagaaaaaaagtactacctgttaacaattgggaaaaggggatattcaaaagttcggtggtgttatgtccagtgtagctttttgtattctattatttgaggctaaaagttgatgtgtgacaaaatacttatgtgttgtatgtcagtgtaacatgcagatgtatattgcagtttttgaaagtgatcattactgtggaatgctaaaaatacattaatttctaaaacctgtgatgccctaagaagcattaagaatgaaggtgttgtactaatagaaactaagtacagaaaatttcagttttaggtggttgtagctgatgagttattacctcatagagactgtaatattctatttggtattatattatttgatgtttgctgttcttcaaacatttaaatcaagctttggactaattatgctaatttgtgagttctgatcacttttgagctctgaagctttgaatcattcagtggtggagatggccttctggtaactgaatattaccttctgtaggaaaaggtggaaaataagcatctagaaggttgttgtgaatgactctgtgctggcaaaaatgcttgaaacctctatatttctttcgttcataagaggtaaaggtcaaatttttcaacaaaagtcttttaataacaaaagcatgcagttctctgtgaaatctcaaatattgttgtaatagtctgtttcaatcttaaaaagaatcaat

SEQ ID NO: 3 - protein, 339 aa, Homo sapiens
MAAACGPGAAGYCLLLGLHLFLLTAGPALGWNDPDRMLLRDVKALTLHYDRYTTSRRLDPIPQLKCVGGTAGCDSYTPKVIQCQNKGWDGYDVQWECKTDLDIAYKFGKTVVSCEGYESSEDQYVLRGSCGLEYNLDYTELGLQKLKESGKQHGFASFSDYYYKWSSADSCNMSGLITIVVLLGIAFVVYKLFLSDGQYSPPPYSEYPPFSHRYQRFTNSAGPPPPGFKSEFTGPQNTGHGATSGFGSAFTGQQGYENSGPGFWTGLGTGGILGYLFGSNRAATPFSDSWYYPSYPPSYPGTWNRAYSPLHGGSGSYSVCSNSDTKTRTASGYGGTRRR

SEQ ID NO: 4 - DNA, 1924 bp, Homo sapiens
  CDS (115)..(1131)
gttccttcgccgccgccaggggtagcggtgtagctgcgcagcgtcgcgcgcgctaccgcacccaggttcggcccgtaggcgtctggcagcccggcgccatcttcatcgagcgccatggccgcagcctgcgggccgggagcggccgggtactgcttgctcctcggcttgcatttgtttctgctgaccgcgggccctgccctgggctggaacgaccctgacagaatgttgctgcgggatgtaaaagctcttaccctccactatgaccgctataccacctcccgcaggctggatcccatcccacagttgaaatgtgttggaggcacagctggttgtgattcttataccccaaaagtcatacagtgtcagaacaaaggctgggatgggtatgatgtacagtgggaatgtaagacggacttagatattgcatacaaatttggaaaaactgtggtgagctgtgaaggctatgagtcctctgaagaccagtatgtactaagaggttcttgtggcttggagtataatttagattatacagaacttggcctgcagaaactgaaggagtctggaaagcagcacggctttgcctctttctctgattattattataagtggtcctcggcggattcctgtaacatgagtggattgattaccatcgtggtactccttgggatcgcctttgtagtctataagctgttcctgagtgacgggcagtattctcctccaccgtactctgagtatcctccattttcccaccgttaccagagattcaccaactcagcaggacctcctcccccaggctttaagtctgagttcacaggaccacagaatactggccatggtgcaacttctggttttggcagtgcttttacaggacaacaaggatatgaaaattcaggaccagggttctggacaggcttgggaactggtggaatactaggatatttgtttggcagcaatagagcggcaacacccttctcagactcgtggtactacccgtcctatcctccctcctaccctggcacgtggaatagggcttactcaccccttcatggaggctcgggcagctattcggtatgttcaaactcagacacgaaaaccagaactgcatcaggatatggtggtaccaggagacgataaagtagaaagttggagtcaaacactggatgcagaaattttggatttttcatcactttctctttagaaaaaaagtactacctgttaacaattgggaaaaggggatattcaaaagttcggtggtgttatgtccagtgtagctttttgtattctattatttgaggctaaaagttgatgtgtgacaaaatacttatgtgttgtatgtcagtgtaacatgcagatgtatattgcagtttttgaaagtgatcattactgtggaatgctaaaaatacattaatttctaaaacctgtgatgccctaagaagcattaagaatgaaggtgttgtactaatagaaactaagtacagaaaatttcagttttaggtggttgtagctgatgagttattacctcatagagactgtaatattctatttggtattatattatttgatgtttgctgttcttcaaacatttaaatcaagctttggactaattatgctaatttgtgagttctgatcacttttgagctctgaagctttgaatcattcagtggtggagatggccttctggtaactgaatattaccttctgtaggaaaaggtggaaaataagcatctagaaggttgttgtgaatgactctgtgctggcaaaaatgcttgaaacctctatatttctttcgttcataagaggtaaaggtcaaatttttcaacaaaagtcttttaataacaaaagcatgcagttctctgtgaaatctcaaatattgttgtaatagtctgtttcaatcttaaaaagaatcaataaaaacaaacaaggg

SEQ ID NO: 5 - protein, 127 aa, Homo sapiens
MAGAIIENMSTKKLCIVGGILLVFQIIAFLVGGLIAPGPTTAVSYMSVKCVDARKNHHKTKWFVPWGPNHCDKIRDIEEAIPREIEANDIVFSVHIPLPHMEMSPWFQFMLFILQLDIAFKLNNQIS

SEQ ID NO: 6 - DNA, 702 bp, Homo sapiens
  CDS (225)..(605)
acaatcacagctccgggcattgggggaacccgagccggctgcgccgggggaatccgtgcgggcgtcttccgtcccggtcccatcctcgccgcgctccagcacctctgaagttttgcagcgcccagaaaggaggcgaggaaggagggagtgtgtgagaggagggagcaaaaagctcaccctaaaacatttatttcaaggagaaaagaaaaagggggggcgcaaaaatggctggggcaattatagaaaacatgagcaccaagaagctgtgcattgttggtgggattctgctcgtgttccaaatcatcgcctttctggtgggaggcttgattgctccagggcccacaacggcagtgtcctacatgtcggtgaaatgtgtggatgcccgtaagaaccatcacaagacaaaatggttcgtgccttggggacccaatcattgtgacaagatccgagacattgaagaggcaattccaagggaaattgaagccaatgacatcgtgttttctgttcacattcccctcccccacatggagatgagtccttggttccaattcatgctgtttatcctgcagctggacattgccttcaagctaaacaaccaaatcagttaagtgtactctcctctcatccctttcttccctttgagcattgccctctttgggttctttttgagccaattctaataaaagtaaaaatggtaatagt

SEQ ID NO: 7 - protein, 233 aa, Homo sapiens
MAGAIIENMSTKKLCIVGGILLVFQIIAFLVGGLIAPGPTTAVSYMSVKCVDARKNHHKTKWFVPWGPNHCDKIRDIEEAIPREIEANDIVFSVHIPLPHMEMSPWFQFMLFILQLDIAFKLNNQIRENAEVSMDVSLAYRDDAFAEWTEMAHERVPRKLKCTFTSPKTPEHEGRYYECDVLPYAQHLHHYGVVLEEDHHDVPTPSASGKSHLCPWDFHDLYQYPSGMVFHRV

SEQ ID NO: 8 - DNA, 2409 bp, Homo sapiens
  CDS (225)..(923)
acaatcacagctccgggcattgggggaacccgagccggctgcgccgggggaatccgtgcgggcgccttccgtcccggtcccatcctcgccgcgctccagcacctctgaagttttgcagcgcccagaaaggaggcgaggaaggagggagtgtgtgagaggagggagcaaaaagctcaccctaaaacatttatttcaaggagaaaagaaaaagggggggcgcaaaaatggctggggcaattatagaaaacatgagcaccaagaagctgtgcattgttggtgggattctgctcgtgttccaaatcatcgcctttctggtgggaggcttgattgctccagggcccacaacggcagtgtcctacatgtcggtgaaatgtgtggatgcccgtaagaaccatcacaagacaaaatggttcgtgccttggggacccaatcattgtgacaagatccgagacattgaagaggcaattccaagggaaattgaagccaatgacatcgtgttttctgttcacattcccctcccccacatggagatgagtccttggttccaattcatgctgtttatcctgcagctggacattgccttcaagctaaacaaccaaatcagagaaaatgcagaagtctccatggacgtttccctggcttaccgtgatgacgcgtttgctgagtggactgaaatggcccatgaaagagtaccacggaaactcaaatgcaccttcacatctcccaagactccagagcatgagggccgttactatgaatgtgatgtccttccttacgcccagcatcttcatcattatggtgtggtattggaggaggatcaccatgatgtcccgacccccagtgcttctggaaaaagtcatctttgcccttgggatttccatgacctttatcaatatcccagtggaatggttttccatcgggtttgactggacctggatgctgctgtttggtgacatccgacagggcatcttctatgcgatgcttctgtccttctggatcatcttctgtggcgagcacatgatggatcagcacgagcggaaccacatcgcagggtattggaagcaagtcggacccattgccgttggctccttctgcctcttcatatttgacatgtgtgagagaggggtacaactcacgaatcccttctacagtatctggactacagacattggaacagagctggccatggccttcatcatcgtggctggaatctgcctctgcctctacttcctgtttctatgcttcatggtatttcaggtgtttcggaacatcagtgggaagcagtccagcctgccagctatgagcaaagtccggcggctacactatgaggggctaatttttaggttcaagttcctcatgcttatcaccttggcctgcgctgccatgactgtcatcttcttcatcgttagtcaggtaacggaaggccattggaaatggggcggcgtcacagtccaagtgaacagtgcctttttcacaggcatctatgggatgtggaatctgtatgtctttgctctgatgttcttgtatgcaccatcccataaaaactatggagaagaccagtccaatggcgatctgggtgtccatagtggggaagaactccagctcaccaccactatcacccatgtggacggacccactgagatctacaagttgacccgcaaggaggcccaggagtaggaggctgcagcgcccggctgggacggtctctccataccccagcccctctaactagagtggggagcatgccagagagagctcaatgtacaaatgaatgcctcatggctcttagctgtggtttcttggaccagcggcatggacatttgtcagtttgccttctgacggtagcttttggaggaagattcctgcagccactaatgcattgtgtatgataacaaaaactctggtatgacacattttctgtgatcattgttaattagtgacatagtaacatctgtagcagctggttagtaaacctcatgtgggggtggggtgggggtgtattccttgggggatggtttgggccgaatggggagtggaatatttgacatttttcctgttttaaattctaggatagattttaacatcctttgcggtcccagtccaaggtaggctggtgtcatagtcttctcactcctaatccatgaccactgtttttttcctatttatatcaccaggtagcccactgagttaatatttaagttgtcaatagataagtgtccctgttttgtggcataatataactgaatttcatgagaagatttattccaccaggggtatttcagctttgaaaccaaatctgtgtatctaatactaaccaatctgttggatgtgggttttaaaaaatgtttgctaaactacccaagtaagatttactgtattaaatggccttcgggtctgaaaagctttttt

SEQ ID NO: 9 - protein, 198 aa, Homo sapiens
MATLWGGLLRLGSLLSLSCLALSVLLLAQLSDAAKNFEDVRCKCICPPYKENSGHIYNKNISQKDCDCLHVVEPMPVRGPDVEAYCLRCECKYEERSSVTIKVTIIIYLSILGLLLLYMVYLTLVEPILKRRLFGHAQLIQSDDDIGDHQPFANAHDVLARSRSRANVLNKVEYAQQRWKLQVQEQRKSVFDRHVVLS

SEQ ID NO: 10 - DNA, 1498 bp, Homo sapiens
  CDS (86)..(679)
gtgcctgagcctgagcctgagcctgagcccgagccgggagccggtcgcgggggctccgggctgtgggaccgctgggcccccagcgatggcgaccctgtggggaggccttcttcggcttggctccttgctcagcctgtcgtgcctggcgctttccgtgctgctgctggcgcagctgtcagacgccgccaagaatttcgaggatgtcagatgtaaatgtatctgccctccctataaagaaaattctgggcatatttataataagaacatatctcagaaagattgtgattgccttcatgttgtggagcccatgcctgtgcgggggcctgatgtagaagcatactgtctacgctgtgaatgcaaatatgaagaaagaagctctgtcacaatcaaggttaccattataatttatctctccattttgggccttctacttctgtacatggtatatcttactctggttgagcccatactgaagaggcgcctctttggacatgcacagttgatacagagtgatgatgatattggggatcaccagccttttgcaaatgcacacgatgtgctagcccgctcccgcagtcgagccaacgtgctgaacaaggtagaatatgcacagcagcgctggaagcttcaagtccaagagcagcgaaagtctgtctttgaccggcatgttgtcctcagctaattgggaattgaattcaaggtgactagaaagaaacaggcagacaactggaaagaactgactgggttttgctgggtttcattttaataccttgttgatttcaccaactgttgctggaagattcaaaactggaagcaaaaacttgcttgatttttttttcttgttaacgtaataatagagacatttttaaaagcacacagctcaaagtcagccaataagtcttttcctatttgtgacttttactaataaaaataaatctgcctgtaaattatcttgaagtcctttacctggaacaagcactctctttttcaccacatagttttaacttgactttcaagataattttcagggtttttgttgttgttgttttttgtttgtttgttttggtgggagaggggagggatgcctgggaagtggttaacaacttttttcaagtcactttactaaacaaacttttgtaaatagaccttaccttctattttcgagtttcatttatattttgcagtgtagccagcctcatcaaagagctgacttactcatttgacttttgcactgactgtattatctgggtatctgctgtgtctgcacttcatggtaaacgggatctaaaatgcctggtggcttttcacaaaaagcagattttcttcatgtactgtgatgtctgatgcaatgcatcctagaacaaactggccatttgctagtttactctaaagactaaacatagtcttggtgtgtgtggtcttactcatcttctagtacctttaaggacaaatcctaaggacttggacacttgcaataaagaaattttattttaaaccc

SEQ ID NO: 11 - protein, 221 aa, Homo sapiens
MALALAALAAVEPACGSRYQQLQNEEESGEPEQAAGDAPPPYSSISAESAAYFDYKDESGFPKPPSYNVATTLPSYDEAERTKAEATIPLVPGRDEDFVGRDDFDDADQLRIGNDGIFMLTFFMAFLFNWIGFFLSFCLTTSAAGRYGAISGFGLSLIKWILIVRFSTYFPGYFDGQYWLWWVFLVLGFLLFLRGFINYAKVRKMPETFSNLPRTRVLFIY

SEQ ID NO: 12 - DNA, 1864 bp, Homo sapiens
  CDS (153)..(815)
ctgagaagagcgtctcgcccgggagcggcggcggccatcgagacccacccaaggcgcgtccccctcggcctcccagcgctcccaagccgcagcggccgcgccccttcagctagctcgctcgctcgctctgcttccctgctgccggctgcgccatggcgttggcgttggcggcgctggcggcggtcgagccggcctgcggcagccggtaccagcagttgcagaatgaagaagagtctggagaacctgaacaggctgcaggtgatgctcctccaccttacagcagcatttctgcagagagcgcagcatattttgactacaaggatgagtctgggtttccaaagcccccatcttacaatgtagctacaacactgcccagttatgatgaagcggagaggaccaaggctgaagctactatccctttggttcctgggagagatgaggattttgtgggtcgggatgattttgatgatgctgaccagctgaggataggaaatgatgggattttcatgttaacttttttcatggcattcctctttaactggattgggtttttcctgtctttttgcctgaccacttcagctgcaggaaggtatggggccatttcaggatttggtctctctctaattaaatggatcctgattgtcaggttttccacctatttccctggatattttgatggtcagtactggctctggtgggtgttccttgttttaggctttctcctgtttctcagaggatttatcaattatgcaaaagttcggaagatgccagaaactttctcaaatctccccaggaccagagttctctttatttattaaagatgttttctggcaaaggccttcctgcatttatgaattctctctcaagaagcaagagaacacctgcaggaagtgaatcaagatgcagaacacagaggaataatcacctgctttaaaaaaataaagtactgttgaaaagatcatttctctctatttgttcctaggtgtaaaattttaatagttaatgcagaattctgtaatcattgaatcattagtggttaatgtttgaaaaagctcttgcaatcaagtctgtgatgtattaataatgccttatatattgtttgtagtcattttaagtagcatgagccatgtccctgtagtcggtagggggcagtcttgctttattcatcctccatctcaaaatgaacttggaattaaatattgtaagatatgtataatgctggccattttaaaggggttttctcaaaagttaaacttttgctatgactgtgtttttgcacataatccatatttgctgttcaagttaatctagaaatttattcaattctgtatgaacacctggaagcaaaatcatagtgcaaaaatacatttaaggtgtggtcaaaaataagtctttaattggtaaataataagcattaattttttatagcctgtattcacaattctgcggtaccttattgtacctaagggattctaaaggtgttgtcactgtataaaacagaaagcactaggatacaaatgaagcttaattactaaaatgtaattcttgacactctttctataattagcgttcttcacccccacccccacccccaccccccttattttccttttgtctcctggtgattaggccaaagtctgggagtaaggagaggattaggtacttaggagcaaagaaagaagtagcttggaacttttgagatgatccctaacatactgtactacttgcttttacaatgtgttagcagaaaccagtgggttataatgtagaatgatgtgctttctgcccaagtggtaattcatcttggtttgctatgttaaaactgtaaatacaacagaacattaataaatatctcttgtgtagc

SEQ ID NO: 13 - protein, 242 aa, Homo sapiens
MDHHQPGTGRYQVLLNEEDNSESSAIEQPPTSNPAPQIVQAASSAPALETDSSPPPYSSITVEVPTTSDTEVYGEFYPVPPPYSVATSLPTYDEAEKAKAAAMAAAAAETSQRIQEEECPPRDDFSDADQLRVGNDGIFMLAFFMAFIFNWLGFCLSFCITNTIAGRYGAICGFGLSLIKWILIVRFSDYFTGYFNGQYWLWWIFLVLGLLLFFRGFVNYLKVRNMSESMAAAHRTRYFFLL

SEQ ID NO: 14 - DNA, 2324 bp, Homo sapiens
  CDS (13)..(738)
gagccgggcaggatggatcaccaccagccggggactgggcgctaccaggtgcttcttaatgaagaggataactcagaatcatcggctatagagcagccacctacttcaaacccagcaccgcagattgtgcaggctgcgtcttcagcaccagcacttgaaactgactcttcccctccaccatatagtagtattactgtggaagtacctacaacttcagatacagaagtttacggtgagttttatcccgtgccacctccctatagcgttgctacctctcttcctacatacgatgaagctgagaaggctaaagctgctgcaatggcagctgcagcagcagaaacatctcaaagaattcaggaggaagagtgtccaccaagagatgacttcagtgatgcagaccagctcagagtggggaatgatggcattttcatgctggcatttttcatggcatttattttcaactggcttggattttgtttatccttctgtatcaccaataccatagctggaaggtatggtgctatctgcggatttggcctttccttgatcaaatggatccttattgtcaggttttctgattattttactggatatttcaatggacagtattggctttggtggatatttcttgtacttggcctgctccttttcttcagaggatttgttaattatctaaaagtcagaaacatgtctgaaagtatggcagctgctcatagaacaaggtatttcttcttattgtagagactgcatcaacccgacattcctttcttataccaatgtgaaatttccagatcatctgtaaacctacaactttaatagaagactactaataacagaagacaaattagtgaagaaaagacggagtttcgaaattgaatggcagggtggtttttgcttacaagccatttctgttcattctttaagtatctatatttcatttgttttgcacatatgcatatgtgcccatttaagatatttgcatatacttgatagaaaccataaagttgtagcagttaagtccagtcacatttggttaatcagtgtttgatataattgaaagagttgagtggataaacagtcttccagcttgtaaatgccattgacttctgacctgacatttagtataataaaaatgaaattcttaaccatgtcaaatgatttagtttctggctcttagactcatctggcagttctacacatgaaacatcttttgttatatagggtgtattgaaacctgcagtgctgattattagaaaggatttgtcagatttttgaacatgatatttacattattatttaggaaaactcttcctgtaaataaccatgcataacttactttctgcaatgttttcttagaaattgtgtccagatagctttcactaattttaaattaagtgaactaaatatatatgtgtatatgtatacacatatatatacacacacacatatatatatttagaaacgtgagtgttaaagatagaatttgttttaggacaaattttaagaaaatgtgggaataccaaatgtcctttataagaaaaataaattttattttaagggacatactagttttagggattttcagatgggaagctgcatttttaggattgcccatcttaagagatcttgcaggaagagattgtattagatattatatttatttcatttaagataattttcaaagttaattttctaaataagataattctcatttgtgtttgtcttttaaaaggccaataaaatatctttcagtatcattgtaataattttttagagtttaatttgtaaagcttagcaaataaaatcttgtactatgaatagcttcttgctttatgactttaggattaacttgtaaaaaacatatcctgaactgagatatgcaaaatactcattttcaagttatggaaatgtgtttgtggcatataggactgtggggtctgtgtgtgtagtgagagtgtgtagccactattataactggaatttaatttacattcataaactactatatttcccatcttgcaaatcattttatgtctcatctgtttttcctttcggttatatctttggttttgaataccaacatttaaaatgatggtattttatcttttaaacttaaaaattatttaatacagctatatggaccttataaaattgatttcttatttattattagacattactactaaaaggtacatctaactattcagggacatttttccatttccaaaaaataaaatttattatgctttataacctcttctgtattttctaattttttcattgtctttgataaataaaacagttttgttttgctaatatagcct

SEQ ID NO: 15 - protein, 242 aa, Homo sapiens
MDHHQPGTGRYQVLLNEEDNSESSAIEQPPTSNPAPQIVQAVSSAPALETDSSPPPYSSITVEVPTTSDTEVYGEFYPVPPPYSVATSLPTYDEAEKAKAAAMAAAAAETSQRIQEEECPPRDDFSDADQLRVGNDGIFMLAFFMAFIFNWLGFCLSFCITNTIAGRYGAICGFGLSLIKWILIVRFSDYFTGYFNGQYWLWWIFLVLGLLLFFRGFVNYLKVRNMSESMAAAHRTRYFFLL

SEQ ID NO: 16 - DNA, 2324 bp, Homo sapiens
  CDS (13)..(738)
gagccgggcaggatggatcaccaccagccggggactgggcgctaccaggtgcttcttaatgaagaggataactcagaatcatcggctatagagcagccacctacttcaaacccagcaccgcagattgtgcaggctgtgtcttcagcaccagcacttgaaactgactcttcccctccaccatatagtagtattactgtggaagtacctacaacttcagatacagaagtttacggtgagttttatcccgtgccacctccctatagcgttgctacctctcttcctacatacgatgaagctgagaaggctaaagctgctgcaatggcagctgcagcagcagaaacatctcaaagaattcaggaggaagagtgtccaccaagagatgacttcagtgatgcagaccagctcagagtggggaatgatggcattttcatgctggcatttttcatggcatttattttcaactggcttggattttgtttatccttctgtatcaccaataccatagctggaaggtatggtgctatctgcggatttggcctttccttgatcaaatggatccttattgtcaggttttctgattattttactggatatttcaatggacagtattggctttggtggatatttcttgtacttggcctgctccttttcttcagaggatttgttaattatctaaaagtcagaaacatgtctgaaagtatggcagctgctcatagaacaaggtatttcttcttattgtagagactgcatcaacccgacattcctttcttataccaatgtgaaatttccagatcatctgtaaacctacaactttaatagaagactactaataacagaagacaaattagtgaagaaaagacggagtttcgaaattgaatggcagggtggtttttgcttacaagccatttctgttcattctttaagtatctatatttcatttgttttgcacatatgcatatgtgcccatttaagatatttgcatatacttgatagaaaccataaagttgtagcagttaagtccagtcacatttggttaatcagtgtttgatataattgaaagagttgagtggataaacagtcttccagcttgtaaatgccattgacttctgacctgacatttagtataataaaaatgaaattcttaaccatgtcaaatgatttagtttctggctcttagactcatctggcagttctacacatgaaacatcttttgttatatagggtgtattgaaacctgcagtgctgattattagaaaggatttgtcagatttttgaacatgatatttacattattatttaggaaaactcttcctgtaaataaccatgcataacttactttctgcaatgttttcttagaaattgtgtccagatagctttcactaattttaaattaagtgaactaaatatatatgtgtatatgtatacacatatatatacacacacacatatatatatttagaaacgtgagtgttaaagatagaatttgttttaggacaaattttaagaaaatgtgggaataccaaatgtcctttataagaaaaataaattttattttaagggacatactagttttagggattttcagatgggaagctgcatttttaggattgcccatcttaagagatcttgcaggaagagattgtattagatattatatttatttcatttaagataattttcaaagttaattttctaaataagataattctcatttgtgtttgtcttttaaaaggccaataaaatatctttcagtatcattgtaataattttttagagtttaatttgtaaagcttagcaaataaaatcttgtactatgaatagcttcttgctttatgactttaggattaacttgtaaaaaacatatcctgaactgagatatgcaaaatactcattttcaagttatggaaatgtgtttgtggcatataggactgtggggtctgtgtgtgtagtgagagtgtgtagccactattataactggaatttaatttacattcataaactactatatttcccatcttgcaaatcattttatgtctcatctgtttttcctttcggttatatctttggttttgaataccaacatttaaaatgatggtattttatcttttaaacttaaaaattatttaatacagctatatggaccttataaaattgatttcttatttattattagacattactactaaaaggtacatctaactattcagggacatttttccatttccaaaaaataaaatttattatgctttataacctcttctgtattttctaattttttcattgtctttgataaataaaacagttttgttttgctaatatagcct

SEQ ID NO: 17 - protein, 336 aa, Homo sapiens
MARRRSQRVCASGPSMLNSARGAPELLRGTATNAEVSAAAAGATGSEELPPGDRGCRNGGGRGPAATTSSTGVAVGAEHGEDSLSRKPDPEPGRMDHHQPGTGRYQVLLNEEDNSESSAIEQPPTSNPAPQIVQAVSSAPALETDSSPPPYSSITVEVPTTSDTEVYGEFYPVPPPYSVATSLPTYDEAEKAKAAAMAAAAAETSQRIQEEECPPRDDFSDADQLRVGNDGIFMLAFFMAFIFNWLGFCLSFCITNTIAGRYGAICGFGLSLIKWILIVRFSDYFTGYFNGQYWLWWIFLVLGLLLFFRGFVNYLKVRNMSESMAAAHRTRYFFLL

SEQ ID NO: 18 - DNA, 2636 bp, Homo sapiens
  CDS (53)..(1060)
cttacttttccatctcctcccacccagctataccctcccactggcggcgcggatggcacgccggcggagccagcgagtctgcgcgagcggtccgagcatgctcaatagcgcgcgcggcgccccggagcttctccgcggaaccgcgaccaacgcggaggtctcggcggccgctgcgggagccacaggaagtgaagagcttccgccgggagaccgcggctgcaggaacggaggcggaaggggccctgcggcgacgacgtcgtcgacgggggtggccgtgggagctgagcacggagaagactccctctctcggaagccggatcccgagccgggcaggatggatcaccaccagccggggactgggcgctaccaggtgcttcttaatgaagaggataactcagaatcatcggctatagagcagccacctacttcaaacccagcaccgcagattgtgcaggctgtgtcttcagcaccagcacttgaaactgactcttcccctccaccatatagtagtattactgtggaagtacctacaacttcagatacagaagtttacggtgagttttatcccgtgccacctccctatagcgttgctacctctcttcctacatacgatgaagctgagaaggctaaagctgctgcaatggcagctgcagcagcagaaacatctcaaagaattcaggaggaagagtgtccaccaagagatgacttcagtgatgcagaccagctcagagtggggaatgatggcattttcatgctggcatttttcatggcatttattttcaactggcttggattttgtttatccttctgtatcaccaataccatagctggaaggtatggtgctatctgcggatttggcctttccttgatcaaatggatccttattgtcaggttttctgattattttactggatatttcaatggacagtattggctttggtggatatttcttgtacttggcctgctccttttcttcagaggatttgttaattatctaaaagtcagaaacatgtctgaaagtatggcagctgctcatagaacaaggtatttcttcttattgtagagactgcatcaacccgacattcctttcttataccaatgtgaaatttccagatcatctgtaaacctacaactttaatagaagactactaataacagaagacaaattagtgaagaaaagacggagtttcgaaattgaatggcagggtggtttttgcttacaagccatttctgttcattctttaagtatctatatttcatttgttttgcacatatgcatatgtgcccatttaagatatttgcatatacttgatagaaaccataaagttgtagcagttaagtccagtcacatttggttaatcagtgtttgatataattgaaagagttgagtggataaacagtcttccagcttgtaaatgccattgacttctgacctgacatttagtataataaaaatgaaattcttaaccatgtcaaatgatttagtttctggctcttagactcatctggcagttctacacatgaaacatcttttgttatataaggtgtattgaaacctgcagtgctgattattagaaaggatttgtcagatttttgaacatgatatttacattattatttaggaaaactcttcctgtaaataaccatgcataacttactttctgcaatgttttcttagaaattgtgtccagatagctttcactaattttaaattaagtgaactaaatatatatgtgtatatgtatacacatatatatacacacacacatatatatatttagaaacgtgagtgttaaagatagaatttgttttaggacaaattttaagaaaatgtgggaataccaaatgtcctttataagaaaaataaattttgttttaagggacataccagttttagggattttcagatgggaagctgcatttttaggattgcccatcttaagagatcttgcaggaagagattgtattagatattatatttatttcatttaagataattttcaaagttaattttctaaataagataattctcatttgtgtttgtcttttaaaaggccaataaaatatctttcagtatcattgtaataattttttagagtttaatttgtaaagcttagcaaataaaatcttgtactatgaatagcttcttgctttatgactttaggattaacttgtaaaaaacatatcctgaactgagatatgcaaaatactcattttcaagttatggaaatgtgtttgtggcatataggactgtggggtctgtgtgtgtagtgagagtgtgtagccactattataactggaatttaatttacattcataaactactatatttcccatcttgcaaatcattttatgtctcatctgtttttcctttcggttatatctttggttttgaataccaacatttaaaatgatggtattttatcttttaaacttaaaaattatttaatacagctatatggaccttataaaattgatttcttatttattattagacattactactaaaaggtacatctaactattcagggacatttttccatttccaaaaaataaaatttattatgctttataacctcttctgtattttctaattttttcattgtctttgataaataaaacagttttgttttgct

SEQ ID NO: 19 - protein, 336 aa, Homo sapiens
MARRRSQRVCASGPSMLNSARGAPELLRGTATNAEVSAAAAGATGSEELPPGDRGCRNGGGRGPAATTSSTGVAVGAEHGEDSLSRKPDPEPGRMDHHQPGTGRYQVLLNEEDNSESSAIEQPPTSNPAPQIVQAASSAPALETDSSPPPYSSITVEVPTTSDTEVYGEFYPVPPPYSVATSLPTYDEAEKAKAAAMAAAAAETSQRIQEEECPPRDDFSDADQLRVGNDGIFMLAFFMAFIFNWLGFCLSFCITNTIAGRYGAICGFGLSLIKWILIVRFSDYFTGYFNGQYWLWWIFLVLGLLLFFRGFVNYLKVRNMSESMAAAHRTRYFFLL

SEQ ID NO: 20 - DNA, 2636 bp, Homo sapiens
  CDS (53)..(1060)
cttacttttccatctcctcccacccagctataccctcccactggcggcgcggatggcacgccggcggagccagcgagtctgcgcgagcggtccgagcatgctcaatagcgcgcgcggcgccccggagcttctccgcggaaccgcgaccaacgcggaggtctcggcggccgctgcgggagccacaggaagtgaagagcttccgccgggagaccgcggctgcaggaacggaggcggaaggggccctgcggcgacgacgtcgtcgacgggggtggccgtgggagctgagcacggagaagactccctctctcggaagccggatcccgagccgggcaggatggatcaccaccagccggggactgggcgctaccaggtgcttcttaatgaagaggataactcagaatcatcggctatagagcagccacctacttcaaacccagcaccgcagattgtgcaggctgcgtcttcagcaccagcacttgaaactgactcttcccctccaccatatagtagtattactgtggaagtacctacaacttcagatacagaagtttacggtgagttttatcccgtgccacctccctatagcgttgctacctctcttcctacatacgatgaagctgagaaggctaaagctgctgcaatggcagctgcagcagcagaaacatctcaaagaattcaggaggaagagtgtccaccaagagatgacttcagtgatgcagaccagctcagagtggggaatgatggcattttcatgctggcatttttcatggcatttattttcaactggcttggattttgtttatccttctgtatcaccaataccatagctggaaggtatggtgctatctgcggatttggcctttccttgatcaaatggatccttattgtcaggttttctgattattttactggatatttcaatggacagtattggctttggtggatatttcttgtacttggcctgctccttttcttcagaggatttgttaattatctaaaagtcagaaacatgtctgaaagtatggcagctgctcatagaacaaggtatttcttcttattgtagagactgcatcaacccgacattcctttcttataccaatgtgaaatttccagatcatctgtaaacctacaactttaatagaagactactaataacagaagacaaattagtgaagaaaagacggagtttcgaaattgaatggcagggtggtttttgcttacaagccatttctgttcattctttaagtatctatatttcatttgttttgcacatatgcatatgtgcccatttaagatatttgcatatacttgatagaaaccataaagttgtagcagttaagtccagtcacatttggttaatcagtgtttgatataattgaaagagttgagtggataaacagtcttccagcttgtaaatgccattgacttctgacctgacatttagtataataaaaatgaaattcttaaccatgtcaaatgatttagtttctggctcttagactcatctggcagttctacacatgaaacatcttttgttatataaggtgtattgaaacctgcagtgctgattattagaaaggatttgtcagatttttgaacatgatatttacattattatttaggaaaactcttcctgtaaataaccatgcataacttactttctgcaatgttttcttagaaattgtgtccagatagctttcactaattttaaattaagtgaactaaatatatatgtgtatatgtatacacatatatatacacacacacatatatatatttagaaacgtgagtgttaaagatagaatttgttttaggacaaattttaagaaaatgtgggaataccaaatgtcctttataagaaaaataaattttgttttaagggacataccagttttagggattttcagatgggaagctgcatttttaggattgcccatcttaagagatcttgcaggaagagattgtattagatattatatttatttcatttaagataattttcaaagttaattttctaaataagataattctcatttgtgtttgtcttttaaaaggccaataaaatatctttcagtatcattgtaataattttttagagtttaatttgtaaagcttagcaaataaaatcttgtactatgaatagcttcttgctttatgactttaggattaacttgtaaaaaacatatcctgaactgagatatgcaaaatactcattttcaagttatggaaatgtgtttgtggcatataggactgtggggtctgtgtgtgtagtgagagtgtgtagccactattataactggaatttaatttacattcataaactactatatttcccatcttgcaaatcattttatgtctcatctgtttttcctttcggttatatctttggttttgaataccaacatttaaaatgatggtattttatcttttaaacttaaaaattatttaatacagctatatggaccttataaaattgatttcttatttattattagacattactactaaaaggtacatctaactattcagggacatttttccatttccaaaaaataaaatttattatgctttataacctcttctgtattttctaattttttcattgtctttgataaataaaacagttttgttttgct

SEQ ID NO: 21 - protein, 76 aa, Homo sapiens
MVCIPCIVIPVLLWIYKKFLEPYIYPLVSPFVSRIWPKKAIQESNDTNKGKVNFKGADMNGLPTKGPTEICDKKKD

SEQ ID NO: 22 - DNA, 1085 bp, Homo sapiens
  CDS (176)..(403)
gggctagcggcctgggttgggctttgtagctgctccgcaggcccagcccgggccgcgctcgcagagtcctaggcggtgcgcggcctcctgcctcctccctcctcggcggtcgcggcccgccggcctccgcggtgcctgccttcgctctcaggttgaggagctcaagcttgggaaaatggtgtgcattccttgtatcgtcattccagttctgctctggatctacaaaaaattcctggagccatatatataccctctggtttcccccttcgttagtcgtatatggcctaagaaagcaatacaagaatccaatgatacaaacaaaggcaaagtaaactttaagggtgcagacatgaatggattaccaacaaaaggaccaacagaaatctgtgataaaaagaaagactaaagaaattttcctaaaggaccccatcatttaaaaaatggacctgataatatgaagcatcttccttgtaattgtctctgacctttttatctgagaccggaattcaggataggagtctagatatttacctgatactaatcaggaaatatatgatatccgtatttaaaatgtagttagttatatttaatgacctcattcctaagttcctttttcgttaatgtagctttcatttctgttattgctgtttgaataatatgattaaatagaaggtttgtgccagtagacattatgttactaaatcagcactttaaaatctttggttctctaattcatatgaatttgctgtttgctctaatttctttgggctcttctaatttgagtggagtacaattttgttgtgaaacagtccagtgaaactgtgcagggaaatgaaggtagaattttgggaggtaataatgatgtgaaacataaagatttaataattactgtccaacacagtggagcagcttgtccacaaatatagtaattactatttattgctctaaggaagattaaaaaaagatagggaaaagggggaaacttctttgaaaaatgaaacatctgttacattaatgtctaattataaaattttaatccttactgcatttcttctgttcctacaaatgtattaaacattcagttt

SEQ ID NO: 23 - protein, 84 aa, Homo sapiens
MAIKFLEVIKPFCVILPEIQKPERKIQFKEKVLWTAITLFIFLVCCQIPLFGIMSSDSADPFYWMRVILASNRGTLMEHSLSGL

SEQ ID NO: 24 - DNA, 1593 bp, Homo sapiens
  CDS (65)..(316)
agcgtcgcctcacgcggagcagagctgagctgaagcgggacccggagcccgagcagccgccgccatggcaatcaaatttctggaagtcatcaagcccttctgtgtcatcctgccggaaattcagaagccagagaggaagattcagtttaaggagaaagtgctgtggaccgctatcaccctctttatcttcttagtgtgctgccagattcccctgtttgggatcatgtcttcagattcagctgaccctttctattggatgagagtgattctagcctctaacagaggcacattgatggagcactctctctctggcctttagggagtcccctcttaggacaggcactgcccagcagcaagggcagcagagttgggtgctaagatcctgaggagctcgaggtttcgagctggctttagacattggtgggaccaaggatgttttgcaggatgccctgatcctaagaagggggcctgggggtgcgtgcagcctgtcggggagaccccactctgtgcacctattggctcttctagctgactcttctcgttgggcttagagtctgcctgtttctgctagctccgtgtttagtccacttgggtcatcagctctgccaagctgagcctggccaagctaggtggacagacccttgcagtgatgtccgtttgtccagattctgccagtcatcactggacacgtctcctcgcagctgccctagcaaggggagacattgtggtagctatcagacatggacagaaactgacttagtgctcacaagcccctacaccttctgggctgaagatcacccagctgtgttcagaattttcttactgtgcttaggactgcacgcaagtgagcagacaccaccgacttcctttctgcgtcaccagtgtcgtcagcagagagaggacagcacaggctcaaggttggtagtgaagtcaggttcggggtgcatgggctgtggtggtggtgatcagttgctccagtgtttgaaataagaagactcatgtttatgtctggaataagttctgtttgtgctgacaggtgaccttgctggcagtgctagccaggaaacagagtgaccaagggacaagaagggacttgcctaaagccacccagcaactcagcagcagaaccaagatgggccccaggctcctccatatggcccagggcttaccaccctatcacacgtggccttgtctagacccagtcctgagcaggggagaggctcttgagacctgatgccctcctacccacatggttctcccactgccctgtctgctctgctgctacagaggggcagggcctcccccagcccacgcttaggaatgcttggcctctggcaggcaggcagctgtacccaagctggtgggcagggggctggaaggcaccaggcctcaggaggagccccatagtcccgcctgcagcctgtaaccatcggctgggccctgcaaggcccacactcacgccctgtgggtgatggtcacggtgggtgggtgggggctgaccccagcttccaggggactgtcactgtggacgccaaaatggcataactgagataaggtgaataagtgacaaataaagccagttttttacaaggt

SEQ ID NO: 25 - protein, 179 aa, Homo sapiens
MAIKFLEVIKPFCVILPEIQKPERKIQFKEKVLWTAITLFIFLVCCQIPLFGIMSSDSADPVHAVVYIVFMLGSCAFFSKTWIEVSGSSAKDVAKQLKEQQMVMRGHRETSMVHELNRYIPTAAAFGGLCIGALSVLADFLGAIGSGTGILLAVTIIYQYFEIFVKEQSEVGSMGALLF

SEQ ID NO: 26 - DNA, 1820 bp, Homo sapiens
  CDS (114)..(650)
gtgtctctcggcggagctgctgtgcagtggaacgcgctgggccgcgggcagcgtcacctcacgcggagcagagctgagctgaagcgggacccggagcccgagcagccgccgccatggcaatcaaatttctggaagtcatcaagcccttctgtgtcatcctgccggaaattcagaagccagagaggaagattcagtttaaggagaaagtgctgtggaccgctatcaccctctttatcttcttagtgtgctgccagattcccctgtttgggatcatgtcttcagattcagctgacccggtccatgcagttgtatacatagtgttcatgctgggctcctgtgcattcttctccaaaacgtggattgaggtctcaggttcctctgccaaagatgttgcaaagcagctgaaggagcagcagatggtgatgagaggccaccgagagacctccatggtccatgaactcaaccggtacatccccacagccgcggcctttggtgggctgtgcatcggggccctctcggtcctggctgacttcctaggcgccattgggtctggaaccgggatcctgctcgcagtcacaatcatctaccagtactttgagatcttcgttaaggagcaaagcgaggttggcagcatgggggccctgctcttctgagcccgtctcccggacaggttgaggaagctgctccagaagcgcctcggaaggggagctctcatcatggcgcgtgctgctgcggcatatggacttttaataatgtttttgaatttcgtattctttcattccactgtgtaaagtgctagacattttccaatttaaaattttgctttttatcctggcactggcaaaaagaactgtgaaagtgaatttattcagccgactgccagagaagtgggaatggtataggattgtccccaagtgtccatgtaacttttgttttaacctttgcaccttctcagtgctgtatgcggctgcagccgtctcacctgtttccccacaaagggaatttctcactctggttggaagcacaaacactgaaatgtctacgtttcattttggcagtagggtgtgaagctgggagcagatcatgtatttcccggagacatgggaccttgctggcatgtctccttcacaatcaggcgtgggaatatctggcttaggactgtttctctctaagacaccattgttttcccttattttaaaagtgatttttttaaggacagaacttcttccaaaagagagggatggctttcccagaagacactctggagaccttgctggcagtgctagccaggaaacagagtgaccaagggacaagaagggacttgcctaaagccacccagcaactcagcagcagaaccaagatgggccccaggctcctccatatggcccagggcttaccaccctatcacacgtggccttgtctagacccagtcctgagcaggggagaggctcttgagacctgatgccctcctacccacatggttctcccactgccctgtctgctctgctgctacaraggggcagggcctcccccagcccacgcttaggaatgcttggcctctggcaggcaggcagctgtacccaagctggtgggcagggggctggaaggcaccaggcctcaggaggagccccatagtcccgcctgcagcctgtaaccatcggctgggccctgcaaggcccacactcacgccctgtgggtgatggtcacggtgggtgggtgggggctgaccccagcttccaggggactgtcactgtggacgccaaaatggcataactsasataaggtgaataagtgacaaataaagccagttttttacaagg

SEQ ID NO: 27 - protein, 279 aa, Homo sapiens
MEAVVNLYQEVMKHADPRIQGYPLMGSPLLMTSILLTYVYFVLSLGPRIMANRKPFQLRGFMIVYNFSLVALSLYIVYEFLMSGWLSTYTWRCDPVDYSNSPEALRMVRVAWLFLFSKFIELMDTVIFILRKKDGQVTFLHVFHHSVLPWSWWWGVKIAPGGMGSFHAMINSSVHVIMYLYYGLSAFGPVAQPYLWWKKHMTAIQLIQFVLVSLHISQYYFMSSCNYQYPVIIHLIWMYGTIFFMLFSNFWYHSYTKGKRLPRALQQNGAPGIAKVKAN

SEQ ID NO: 28 - DNA, 1472 bp, Homo sapiens
  CDS (119)..(955)
gcccagcagatgaggaagtggcaggcaggcaggctggccccggggacttctctctggccctgctccctccgagcgctccgccgttgcccgcctggcccctacggagtccttagccaggatggaggctgttgtgaacttgtaccaagaggtgatgaagcacgcagatccccggatccagggctaccctctgatggggtcccccttgctaatgacctccattctcctgacctacgtgtacttcgttctctcacttgggcctcgcatcatggctaatcggaagcccttccagctccgtggcttcatgattgtctacaacttctcactggtggcactctccctctacattgtctatgagttcctgatgtcgggctggctgagcacctatacctggcgctgtgaccctgtggactattccaacagccctgaggcacttaggatggttcgggtggcctggctcttcctcttctccaagttcattgagctgatggacacagtgatctttattctccgaaagaaagacgggcaggtgaccttcctacatgtcttccatcactctgtgcttccctggagctggtggtggggggtaaagattgccccgggaggaatgggctctttccatgccatgataaactcttccgtgcatgtcataatgtacctgtactacggattatctgcctttggccctgtggcacaaccctacctttggtggaaaaagcacatgacagccattcagctgatccagtttgtcctggtctcactgcacatctcccagtactactttatgtccagctgtaactaccagtacccagtcattattcacctcatctggatgtatggcaccatcttcttcatgctgttctccaacttctggtatcactcttataccaagggcaagcggctgccccgtgcacttcagcaaaatggagctccaggtattgccaaggtcaaggccaactgagaagcatggcctagataggcgcccacctaagtgcctcaggactgcaccttagggcagtgtccgtcagtgccctctccacctacacctgtgaccaaggcttatgtggtcaggactgagcaggggactggccctcccctccccacagctgctctacagggaccacggctttggttcctcacccacttcccccgggcagctccagggatgtggcctcattgctgtctgccactccagagctgggggctaaaagggctgtacagttatttccccctccctgccttaaaacttgggagaggagcactcagggctggccccacaaagggtctcgtggcctttttcctcacacagaagaggtcagcaataatgtcactgtggacccagtctcactcctccaccccacacactgaagcagtagcttctgggccaaaggtcagggtgggcgggggcctgggaatacagcctgtggaggctgcttactcaacttgtgtcttaattaaaagtgacagaggaaacc

SEQ ID NO: 29 - protein, 137 aa, Homo sapiens
MGFGATLAVGLTIFVLSVVTIIICFTCSCCCLYKTCRRPRPVVTTTTSTTVVHAPYPQPPSVPPSYPGPSYQGYHTMPPQPGMPAAPYPMQYPPPYPAQPMGPPAYHETLAGGAAAPYPASQPPYNPAYMDAPKAAL

SEQ ID NO: 30 - DNA, 1788 bp, Homo sapiens
  CDS (145)..(555)
gtgcttcctgtggctgacgtcatctggaggagatttgctttctttttctccaaaaggggaggaaattgaaactgagtggcccacgatgggaagaggggaaagcccaggggtacaggaggcctctgggtgaaggcagaggctaacatggggttcggagcgaccttggccgttggcctgaccatctttgtgctgtctgtcgtcactatcatcatctgcttcacctgctcctgctgctgcctttacaagacgtgccgccgaccacgtccggttgtcaccaccaccacatccaccactgtggtgcatgccccttatcctcagcctccaagtgtgccgcccagctaccctggaccaagctaccagggctaccacaccatgccgcctcagccagggatgccagcagcaccctacccaatgcagtacccaccaccttacccagcccagcccatgggcccaccggcctaccacgagaccctggctggaggagcagccgcgccctaccccgccagccagcctccttacaacccggcctacatggatgccccgaaggcggccctctgagcattccctggcctctctggctgccacttggttatgttgtgtgtgtgcgtgagtggtgtgcaggcgcggttccttacgccccatgtgtgctgtgtgtgtccaggcacggttccttacgccccatgtgtgctgtgtgtgtcctgcctgtatatgtggcttcctctgatgctgacaaggtggggaacaatccttgccagagtgggctgggaccagactttgttctcttcctcacctgaaattatgcttcctaaaatctcaagccaaactcaaagaatggggtggtggggggcaccctgtgaggtggcccctgagaggtgggggcctctccagggcacatctggagttcttctccagcttaccctagggtgaccaagtagggcctgtcacaccagggtggcgcagctttctgtgtgatgcagatgtgtcctggtttcggcagcgtagccagctgctgcttgaggccatggctcgtccccggagttgggggtacccgttgcagagccagggacatgatgcaggcgaagcttgggatctggccaagttggactttgatcctttgggcagatgtcccattgctccctggagcctgtcatgcctgttggggatcaggcagcctcctgatgccagaacacctcaggcagagccctactcagctgtacctgtctgcctggactgtcccctgtccccgcatctcccctgggaccagctggagggccacatgcacacacagcctagctgcccccagggagctctgctgcccttgctggccctgcccttcccacaggtgagcagggctcctgtccaccagcacactcagttctcttccctgcagtgttttcattttattttagccaaacattttgcctgttttctgtttcaaacatkatagttgatatgagactgaaacccctgggttgtggagggaaattggctcagagatggacaacctggcaactgtgagtccctgcttcccgacaccagcctcatggaatatgcaacaactcctgtaccccagtccacggtgttctggcagcagggacacctgggccaatgggccatctggaccaaaggtggggtgtggggccctggatggcagctctggcccagacatgaatacctcgtgttcctcctccctctattactgtttcaccagagctgtcttagctcaaatctgttgtgtttctgagtctagggtctgtacacttgtttataataaatgcaatcgtttgg

SEQ ID NO: 31 - protein, 118 aa, Homo sapiens
MGFGATLAVGLTIFVLSVVTIIICFTCSCCCLYKTCRRPRPVVTTTTSTTVVHAPYPQPPSVPPSYPGPSYQGYHTMPPQPGMPAAPYPMQYPPPYPAQPMGPPAYHETLAGECPCQL

SEQ ID NO: 32 - DNA, 1908 bp, Homo sapiens
  CDS (91)..(444)
gggggaggaaattgaaactgagtggcccacgatgggaagaggggaaagcccaggggtacaggaggcctctgggtgaaggcagaggctaacatggggttcggagcgaccttggccgttggcctgaccatctttgtgctgtctgtcgtcactatcatcatctgcttcacctgctcctgctgctgcctttacaagacgtgccgccgaccacgtccggttgtcaccaccaccacatccaccactgtggtgcatgccccttatcctcagcctccaagtgtgccgcccagctaccctggaccaagctaccagggctaccacaccatgccgcctcagccagggatgccagcagcaccctacccaatgcagtacccaccaccttacccagcccagcccatgggcccaccggcctaccacgagaccctggctggtgagtgcccctgccaactctagccctgcccgacttcccgagtctctgccagcatccctcgggcacccatcccaaactacatcactcaacaggcctctgcccctttctgcttgcctgccactcacacggcagcccaccatgctcacagccaaccagggtcctctctgctttcaggaggagcagccgcgccctaccccgccagccagcctccttacaacccggcctacatggatgccccgaaggcggccctctgagcattccctggcctctctggctgccacttggttatgttgtgtgtgtgcgtgagtggtgtgcaggcgcggttccttacgccccatgtgtgctgtgtgtgtccaggcacggttccttacgccccatgtgtgctgtgtgtgtcctgcctgtatatgtggcttcctctgatgctgacaaggtggggaacaatccttgccagagtgggctgggaccagactttgttctcttcctcacctgaaattatgcttcctaaaatctcaagccaaactcaaagaatggggtggtggggggcaccctgtgaggtggcccctgagaggtgggggcctctccagggcacatctggagttcttctccagcttaccctagggtgaccaagtagggcctgtcacaccagggtggcgcagctttctgtgtgatgcagatgtgtcctggtttcggcagcgtagccagctgctgcttgaggccatggctcgtccccggagttgggggtacccgttgcagagccagggacatgatgcaggcgaagcttgggatctggccaagttggactttgatcctttgggcagatgtcccattgctccctggagcctgtcatgcctgttggggatcaggcagcctcctgatgccagaacacctcaggcagagccctactcagctgtacctgtctgcctggactgtcccctgtccccgcatctcccctgggaccagctggagggccacatgcacacacagcctagctgcccccagggagctctgctgcccttgctggccctgcccttcccacaggtgagcagggctcctgtccaccagcacactcagttctcttccctgcagtgttttcattttattttagccaaacattttgcctgttttctgtttcaaacatgatagttgatatgagactgaaacccctgggttgtggagggaaattggctcagagatggacaacctggcaactgtgagtccctgcttcccgacaccagcctcatggaatatgcaacaactcctgtaccccagtccacggtgttctggcagcagggacacctgggccaatgggccatctggaccaaaggtggggtgtggggccctggatggcagctctggcccagacatgaatacctcgtgttcctcctccctctattactgtttcaccagagctgtcttagctcaaatctgttgtgtttctgagtctagggtctgtacacttgtttataataaatgcaatcgtttgg

SEQ ID NO: 33 - protein, 168 aa, Homo sapiens
MNSKGQYPTQPTYPVQPPGNPVYPQTLHLPQAPPYTDAPPAYSELYRPSFVHPGAATVPTMSAAFPGASLYLPMAQSVAVGPLGSTIPMAYYPVGPIYPPGSTVLVEGGYDAGARFGAGATAGNIPPPPPGCPPNAAQLAVMQGANVLVTQRKGNFFMGGSDGGYTIW

SEQ ID NO: 34 - DNA, 1897 bp, Homo sapiens
  CDS (70)..(573)
ctccgaacaggaagaggacgaaaaaaataaccgtccgcgacgccgagacaaaccggacccgcaaccaccatgaacagcaaaggtcaatatccaacacagccaacctaccctgtgcagcctcctgggaatccagtataccctcagaccttgcatcttcctcaggctccaccctataccgatgctccacctgcctactcagagctctatcgtccgagctttgtgcacccaggggctgccacagtccccaccatgtcagccgcatttcctggagcctctctgtatcttcccatggcccagtctgtggctgttgggcctttaggttccacaatccccatggcttattatccagtcggtcccatctatccacctggctccacagtgctggtggaaggagggtatgatgcaggtgccagatttggagctggggctactgctggcaacattcctcctccacctcctggatgccctcccaatgctgctcagcttgcagtcatgcagggagccaacgtcctcgtaactcagcggaaggggaacttcttcatgggtggttcagatggtggctacaccatctggtgaggaaccaaggccacctctgtgccgggaaagacatcacataccttcagcacttctcacaatgtaactgctttagtcatattaacctgaagttgcagtttagacacatgttgttggggtgtctttctggtgcccaaactttcaggcacttttcaaatttaataaggaaccatgtaatggtagcagtacctccctaaagcattttgaggtaggggaggtatccattcataaaatgaatgtgggtgaagccgccctaaggattttcctttaatttctctggagtaatactgtaccatactggtctttgcttttagtaataaaacatcaaattaggtttggagggaactttgatcttcctaagaattaaagttgccaaattattctgattggtctttaatctcctttaagtctttgatatatattacttgttataaatggaacgcattagttgtctgccttttcctttccatcccttgccccacccatcccatctccaaccctagtcttccatttcctcccgccagtctccattgaatcaatggtgcaggacagaaagccagtcagactaatttccttctttcctcgcacttctccccactcgtcatcttttaactagtgtttcacaaggatcctctgaaaccctctctgtgccccaagtacagatgccattacttctgctttcgtatctcctcaggcaaaagtggagggtgccttatgggccctcctcataggttgtctctgcatacacgaacctaacccaaatttgctttggtgccagaaaaactgagctatgtttgaacaaagatgtcgtgcaaactgtactgtgaacaacagttggtttaaaatatgaggggcaaggaggaggatgcatttcaaaagcttgattgatgtgttcagagctaaattaagaggagttttcagatcaaaaactggttaccattttttgtcagagtgtctgatgcggccactcattcggctccccagaattcctagactgggttaatagggtcatattgtgaatgtctcactacaaaatgacttgagtccagtgaaatctcattagggtttaagaatatttcagggatccttaatgttttgatttttgttttctgaaattggattttattttattttatcttataatttcagttcatctaaattgtgtgttctgtacatgtgatgtttgactgtaccattgactgttatggaagttcagcgttgtatgtctctctctacactgtggtgcacttaacttgtggaatttttatactaaaaatgtagaataaagactattttgaagatttgaataaagtgatgaagttgc

SEQ ID NO: 35 - protein, 455 aa, Homo sapiens
MSFLIDSSIMITSQILFFGFGWLFFMRQLFKDYEIRQYVVQVIFSVTFAFSCTMFELIIFEILGVLNSSSRYFHWKMNLCVILLILVFMVPFYIGYFIVSNIRLLHKQRLLFSCLLWLTFMYFFWKLGDPFPILSPKHGILSIEQLISRVGVIGVTLMALLSGFGAVNCPYTYMSYFLRNVTDTDILALERRLLQTMDMIISKKKRMAMARRTMFQKGEVHNKPSGFWGMIKSVTTSASGSENLTLIQQEVDALEELSRQLFLETADLYATKERIEYSKTFKGKYFNFLGYFFSIYCVWKIFMATINIVFDRVGKTDPVTRGIEITVNYLGIQFDVKFWSQHISFILVGIIIVTSIRGLLITLTKFFYAISSSKSSNVIVLLLAQIMGMYFVSSVLLIRMSMPLEYRTIITEVLGELQFNFYHRWFDVIFLVSALSSILFLYLAHKQAPEKQMAP

SEQ ID NO: 36 - DNA, 1903 bp, Homo sapiens
  CDS (116)..(1480)
agtcccggctgcagcacctgggagaaggcagaccgtgtgagggggcctgtggccccagcgtgctgtggcctcggggagtgggaagtggaggcaggagccttccttacacttcgccatgagtttcctcatcgactccagcatcatgattacctcccagatactattttttggatttgggtggcttttcttcatgcgccaattgtttaaagactatgagatacgtcagtatgttgtacaggtgatcttctccgtgacgtttgcattttcttgcaccatgtttgagctcatcatctttgaaatcttaggagtattgaatagcagctcccgttattttcactggaaaatgaacctgtgtgtaattctgctgatcctggttttcatggtgcctttttacattggctattttattgtgagcaatatccgactactgcataaacaacgactgcttttttcctgtctcttatggctgacctttatgtatttcttctggaaactaggagatccctttcccattctcagcccaaaacatgggatcttatccatagaacagctcatcagccgggttggtgtgattggagtgactctcatggctcttctttctggatttggtgctgtcaactgcccatacacttacatgtcttacttcctcaggaatgtgactgacacggatattctagccctggaacggcgactgctgcaaaccatggatatgatcataagcaaaaagaaaaggatggcaatggcacggagaacaatgttccagaagggggaagtgcataacaaaccatcaggtttctggggaatgataaaaagtgttaccacttcagcatcaggaagtgaaaatcttactcttattcaacaggaagtggatgctttggaagaattaagcaggcagctttttctggaaacagctgatctatatgctaccaaggagagaatagaatactccaaaaccttcaaggggaaatattttaattttcttggttactttttctctatttactgtgtttggaaaattttcatggctaccatcaatattgtttttgatcgagttgggaaaacggatcctgtcacaagaggcattgagatcactgtgaattatctgggaatccaatttgatgtgaagttttggtcccaacacatttccttcattcttgttggaataatcatcgtcacatccatcagaggattgctgatcactcttaccaagttcttttatgccatctctagcagtaagtcctccaatgtcattgtcctgctattagcacagataatgggcatgtactttgtctcctctgtgctgctgatccgaatgagtatgcctttagaataccgcaccataatcactgaagtccttggagaactgcagttcaacttctatcaccgttggtttgatgtgatcttcctggtcagcgctctctctagcatactcttcctctatttggctcacaaacaggcaccagagaagcaaatggcaccttgaacttaagcctactacagactgttagaggccagtggtttcaaaatttagatataagaggggggaaaaatggaaccagggcctgacattttataaacaaacaaaatgctatggtagcatttttcaccttcatagcatactccttccccgtcaggtgatactatgaccatgagtagcatcagccagaacatgagagggagaactaactcaagacaatactcagcagagagcatcccgtgtggatatgaggctggtgtagaggcggagaggagccaagaaactaaaggtgaaaaatacactggaactctggggcaagacatgtctatggtagctgagccaaacacgtaggatttccgttttaaggttcacatggaaaaggttatagctttgccttgagattgactcattaaaatcagagactgt

SEQ ID NO: 37 - protein, 322 aa, Homo sapiens
MSSLGGGSQDAGGSSSSSTNGSGGSGSSGPKAGAADKSAVVAAAAPASVADDTPPPERRNKSGIISEPLNKSLRRSRPLSHYSSFGSSGGSGGGSMMGGESADKATAAAAAASLLANGHDLAAAMAVDKSNPTSKHKSGAVASLLSKAERATELAAEGQLTLQQFAQSTEMLKRVVQEHLPLMSEAGAGLPDMEAVAGAEALNGQSDFPYLGAFPINPGLFIMTPAGVFLAESALHMAGLAEYPMQGELASAISSGKKKRKRCGMCAPCRRRINCEQCSSCRNRKTGHQICKFRKCEELKKKPSAALEKVMLPTGAAFRWFQ

SEQ ID NO: 38 - DNA, 1448 bp, Homo sapiens
  CDS (292)..(1257)
tactgctggcggctggagcggagcgcaccgcggcggtggtgcccagagcggagcgcagctccctgccccgcccctccccctcggcctcgcggcgacggcggcggtggcggcttggacgactcggagagccgagtgaagacatttccacctggacacctgaccatgtgcctgccctgagcagcgaggcccaccaggcatctctgttgtgggcagcagggccaggtcctggtctgtggaccctcggcagttggcaggctccctctgcagtggggtctgggcctcggccccaccatgtcgagcctcggcggtggctcccaggatgccggcggcagtagcagcagcagcaccaatggcagcggtggcagtggcagcagtggcccaaaggcaggagcagcagacaagagtgcagtggtggctgccgccgcaccagcctcagtggcagatgacacaccaccccccgagcgtcggaacaagagcggtatcatcagtgagcccctcaacaagagcctgcgccgctcccgcccgctctcccactactcttcttttggcagcagtggtggtagtggcggtggcagcatgatgggcggagagtctgctgacaaggccactgcggctgcagccgctgcctccctgttggccaatgggcatgacctggcggcggccatggcggtggacaaaagcaaccctacctcaaagcacaaaagtggtgctgtggccagcctgctgagcaaggcagagcgggccacggagctggcagccgagggacagctgacgctgcagcagtttgcgcagtccacagagatgctgaagcgcgtggtgcaggagcatctcccgctgatgagcgaggcgggtgctggcctgcctgacatggaggctgtggcaggtgccgaagccctcaatggccagtccgacttcccctacctgggcgctttccccatcaacccaggcctcttcattatgaccccggcaggtgtgttcctggccgagagcgcgctgcacatggcgggcctggctgagtaccccatgcagggagagctggcctctgccatcagctccggcaagaagaagcggaaacgctgcggcatgtgcgcgccctgccggcggcgcatcaactgcgagcagtgcagcagttgtaggaatcgaaagactggccatcagatttgcaaattcagaaaatgtgaggaactcaaaaagaagccttccgctgctctggagaaggtgatgcttccgacgggagccgccttccggtggtttcagtgacggcggcggaacccaaagctgccctctccgtgcaatgtcactgctcgtgtggtctccagcaagggattcgggcgaagacaaacggatgcacccgtctttagaaccaaaaatattctctcacagatttcattcctgtttttatatatatattttttgttgtcgttttaacatctccacgtccctagcat

SEQ ID NO: 39 - protein, 313 aa, Homo sapiens
MAGQPGHMPHGGSSNNLCHTLGPVHPPDPQRHPNTLSFRCSLADFQIEKKIGRGQFSEVYKATCLLDRKTVALKKVQIFEMMDAKARQDCVKEIGLLKQLNHPNIIKYLDSFIEDNELNIVLELADAGDLSQMIKYFKKQKRLIPERTVWKYFVQLCSAVEHMHSRRVMHRDIKPANVFITATGVVKLGDLGLGRFFSSETTAAHSLVGTPYYMSPERIHENGYNFKSDIWSLGCLLYEMAALQSPFYGDKMNLFSLCQKIEQCDYPPLPGEHYSEKLRELVSMCICPDPHQRPDIGYVHQVAKQMHIWMSST

SEQ ID NO: 40 - DNA, 1597 bp, Homo sapiens
  CDS (153)..(1091)
ggcggaaccgagctgacgggcgtgcggccgctgcgccgcaaactcgtgtgggacgcaccgctccagccgcccgcgggccagcgcaccggtcccccagcggcagccgagcccgcccgcgcgccgttcgtgccctcgtgaggctggcatgcaggatggcaggacagcccggccacatgccccatggagggagttccaacaacctctgccacaccctggggcctgtgcatcctcctgacccacagaggcatcccaacacgctgtcttttcgctgctcgctggcggacttccagatcgaaaagaagataggccgaggacagttcagcgaggtgtacaaggccacctgcctgctggacaggaagacagtggctctgaagaaggtgcagatctttgagatgatggacgccaaggcgaggcaggactgtgtcaaggagatcggcctcttgaagcaactgaaccacccaaatatcatcaagtatttggactcgtttatcgaagacaacgagctgaacattgtgctggagttggctgacgcaggggacctctcgcagatgatcaagtactttaagaagcagaagcggctcatcccggagaggacagtatggaagtactttgtgcagctgtgcagcgccgtggagcacatgcattcacgccgggtgatgcaccgagacatcaagcctgccaacgtgttcatcacagccacgggcgtcgtgaagctcggtgaccttggtctgggccgcttcttcagctctgagaccaccgcagcccactccctagtggggacgccctactacatgtcaccggagaggatccatgagaacggctacaacttcaagtccgacatctggtccttgggctgtctgctgtacgagatggcagccctccagagccccttctatggagataagatgaatctcttctccctgtgccagaagatcgagcagtgtgactaccccccactccccggggagcactactccgagaagttacgagaactggtcagcatgtgcatctgccctgacccccaccagagacctgacatcggatacgtgcaccaggtggccaagcagatgcacatctggatgtccagcacctgagcgtggatgcaccgtgccttatcaaagccagcaccactttgccttacttgagtcgtcttctcttcgagtggccacctggtagcctagaacagctaagaccacagggttcagcaggttccccaaaaggctgcccagccttacagcagatgctgaaggcagagcagctgagggaggggcgctggccacatgtcactgatggtcagattccaaagtcctttctttatactgttgtggacaatctcagctgggtcaataagggcaggtggttcagcgagccacggcagccccctgtatctggattgtaatgtgaatctttagggtaattcctccagtgacctgtcaaggcttatgctaacaggagacttgcaggagaccgtgtgatttgtgtagtgagcctttgaaaatggttagtaccgggttcagtttagttcttggtatcttttcaatcaagctgtgtgcttaatttactctgttgtaaagggataaagtggaaatcatttttt

SEQ ID NO: 41 - protein, 371 aa, Homo sapiens
MSHEKSFLVSGDNYPPPNPGYPGGPQPPMPPYAQPPYPGAPYPQPPFQPSPYGQPGYPHGPSPYPQGGYPQGPYPQGGYPQGPYPQEGYPQGPYPQGGYPQGPYPQSPFPPNPYGQPQVFPGQDPDSPQHGNYQEEGPPSYYDNQDFPATNWDDKSIRQAFIRKVFLVLTLQLSVTLSTVSVFTFVAEVKGFVRENVWTYYVSYAVFFISLIVLSCCGDFRRKHPWNLVALSVLTASLSYMVGMIASFYNTEAVIMAVGITTAVCFTVVIFSMQTRYDFTSCMGVLLVSMVVLFIFAILCIFIRNRILEIVYASLGALLFTCFLAVDTQLLLGNKQLSLSPEEYVFAALNLYTDIINIFLYILTIIGRAKE

SEQ ID NO: 42 - DNA, 1781 bp, Homo sapiens
  CDS (91)..(1203)
attggccatcaccgcgcggccgcgcagcggacaccgtgcgtaccggcctgcggcgcccggccaccggggcggaccgcggaacccgaggccatgtcccatgaaaagagttttttggtgtctggggacaactatcctccccccaaccctggatatccgggggggccccagccacccatgcccccctatgctcagcctccctaccctggggccccttacccacagccccctttccagccctccccctacggtcagccagggtacccccatggccccagcccctacccccaagggggctacccacagggtccctacccccaagggggctacccacagggcccctacccacaagagggctacccacagggcccctacccccaagggggctacccccaggggccatatccccagagccccttcccccccaacccctatggacagccacaggtcttcccaggacaagaccctgactcaccccagcatggaaactaccaggaggagggtcccccatcctactatgacaaccaggacttccctgccaccaactgggatgacaagagcatccgacaggccttcatccgcaaggtgttcctagtgctgaccttgcagctgtcggtgaccctgtccacggtgtctgtgttcacttttgttgcggaggtgaagggctttgtccgggagaatgtctggacctactatgtctcctatgctgtcttcttcatctctctcatcgtcctcagctgttgtggggacttccggcgaaagcacccctggaaccttgttgcactgtcggtcctgaccgccagcctgtcgtacatggtggggatgatcgccagcttctacaacaccgaggcagtcatcatggccgtgggcatcaccacagccgtctgcttcaccgtcgtcatcttctccatgcagacccgctacgacttcacctcatgcatgggcgtgctcctggtgagcatggtggtgctcttcatcttcgccattctctgcatcttcatccggaaccgcatcctggagatcgtgtacgcctcactgggcgctctgctcttcacctgcttcctcgcagtggacacccagctgctgctggggaacaagcagctgtccctgagcccagaagagtatgtgtttgctgcgctgaacctgtacacagacatcatcaacatcttcctgtacatcctcaccatcattggccgcgccaaggagtagccgagctccagctcgctgtgcccgctcaggtggcacggctggcctggaccctgcccctggcacggcagtgccagctgtacttcccctctctcttgtccccaggcacagcctagggaaaaggatgcctctctccaaccctcctgtatgtacactgcagatacttccatttggacccgctgtggccacagcatggcccctttagtcctcccgcccccgccaaggggcagcaaggccacgtttccgtgccacctcctgtctactcattgttgcatgagccctgtctgccagcccaccccagggactgggggcagcaccaggtcccggggagagggattgagccaagaggtgagggtgcacgtcttccctcctgtcccagctccccagcctggcgtagagcacccctcccctcccccccacccccctggagtgctgccctctggggacatgcggagtgggggtcttatccctgtgctgagccctgagggcagagaggatggcatgtttcaggggagggggaagccttcctctcaatttgttgtcagtgaaattccaataaatgggatttgctctctgcc

SEQ ID NO: 43 - protein, 393 aa, Homo sapiens
MSDEREVAEAATGEDASSPPPKTEAASDPQHPAASEGAAAAAASPPLLRCLVLTGFGGYDKVKLQSRPAAPPAPGPGQLTLRLRACGLNFADLMARQGLYDRLPPLPVTPGMEGAGVVIAVGEGVSDRKAGDRVMVLNRSGMWQEEVTVPSVQTFLIPEAMTFEEAAALLVNYITAYMVLFDFGNLQPGHSVLVHMAAGGVGMAAVQLCRTVENVTVFGTASASKHEALKENGVTHPIDYHTTDYVDEIKKISPKGVDIVMDPLGGSDTAKGYNLLKPMGKVVTYGMANLLTGPKRNLMALARTWWNQFSVTALQLLQANRAVCGFHLGYLDGEVELVSGVVARLLALYNQGHIKPHIDSVWPFEKVADAMKQMQEKKNVGKVLLVPGPEKEN

SEQ ID NO: 44 - DNA, 2396 bp, Homo sapiens
  CDS (50)..(1228)
agctgtgcactctccatccagctgtgcgctctcgtcgggagtcccagccatgtccgacgagagagaggtagccgaggcagcgaccggggaagacgcctcttcgccgcctccgaaaaccgaggcagcgagcgacccccagcatcccgcggcctccgaaggggccgccgccgccgccgcctcgccgccactgctgcgctgcctagtgctcaccggctttggaggctacgacaaggtgaagctgcagagccggccggcagcgcccccggcccctgggcccggccagctgacgctgcgtctgcgggcctgcgggctcaacttcgcagacctcatggctaggcaggggctgtacgaccgtctcccgcctctgcctgtcactccgggcatggagggcgcgggtgttgtgatcgcagtgggcgagggagtcagcgaccgcaaggcaggagaccgggtgatggtgttgaaccggtcagggatgtggcaggaagaggtgactgtgccctcggtccagaccttcctgattcctgaggccatgacctttgaggaagctgctgccttgctcgtcaattacattacagcctacatggtcctctttgacttcggcaacctacagcctggccacagcgtcttggtacacatggctgcagggggtgtgggtatggctgccgtgcagctgtgccgtacagtggagaatgtgacagtgttcggaacggcctcggccagcaagcacgaggcactgaaggagaatggggtcacacatcccatcgactatcacacgactgactacgtggatgagatcaagaagatttcccctaaaggagtggacattgtcatggaccctctgggtgggtcagatactgccaagggctacaacctcctgaaacccatgggcaaagtcgtcacctatggaatggccaacctgctgacgggccccaaacggaacctgatggccctggcccggacatggtggaatcagttcagcgtgacagctctgcagctgctgcaggccaaccgggctgtgtgtggcttccacctgggctacctggatggtgaggtggagctggtcagtggtgtggtggcccgcctcctggctctgtacaaccagggccacatcaagccccacattgactcagtctggcccttcgagaaggtggctgatgccatgaaacagatgcaggagaagaagaatgtgggcaaggtcctcctggttccagggccagagaaggagaactagggcaagtggctgtgagaccctagagaccagcgaagggagaagttgggaagctacgttctgttggccaccagacttgcatttcagcctctgtcataatgctctgccctccctcccccgaagttctctgtggtgatgaccgctctcccctgcccctccccgcttcctgacctctgaagaggttgggaagtgaccatttggatgtctgggccctgccaaggcgacagggagggtcagagggaggccggctgcttcctgcccccaccctttccccgggcctgctgtgctgcttttgtgccaaggttagccagtcccccctgttgtgttccatgtgctttcacctctgcctcatctttcctcccgtccctgccccgccacctccccaaagaattgaaacgtcagctcaggatatggggccaatctctgtgagtccagcatgtacctgtctctccctagtgtcccttcagcctgggctgaccagtgcccgcctctgggcttgaccagttcccaatctcgtcctctgtccccaacttcttaagcacaattgggcttcttccatctccaggttttctgccattcttaaccaaggcagccccaagcctcctggggaggcagggcaaaaacaggtgccctcatcgtggtctgtgccatgtcccgtctctatggtggttgaggagaaaggcggggaagcttcctcagccttgcagatatgtgtggcatttactagccagagctctgaaaggcagtgctgtctgtttcttgtactgggaccaaagtaaaaatccaagcacattccccttgcagttaggggaggccctactgccttctcaaagcagagaggcagcttatcaaactcagcccaaaactctgtttacatgggtggggagatggagcagggaagtacagagtgggatggtcaggacctgggccattgcaaccaaaatggggacttcctgggtagggaggtcactccctctactcactgagctaggattagggagggttattgccccaaccattgcaatgggaggtggagggacaggctcagcctcctcattgtctaaatgaggcctaaatgtgtgaagtgcgatttctgcttttgtgtaccccaccaccccattaccacagctgcctttgtgtgtttgtgtcaataaaaagccaaaccctg

SEQ ID NO: 45 - protein, 393 aa, Homo sapiens
MSDEREVAEAATGEDASSPPPKTEAASDPQHPAASEGAAAAAASPPLLRCLVLTGFGGYDKVKLQSRPAAPPAPGPGQLTLRLRACGLNFADLMARQGLYDRLPPLPVTPGMEGAGVVIAVGEGVSDRKAGDRVMVLNRSGMWQEEVTVPSVQTFLIPEAMTFEEAAALLVNYITAYMVLFDFGNLQPGHSVLVHMAAGGVGMAAVQLCRTVENVTVFGTASASKHEALKENGVTHPIDYHTTDYVDEIKKISPKGVDIVMDPLGGSDTAKGYNLLKPMGKVVTYGMANLLTGPKRNLMALARTWWNQFSVTALQLLQANRAVCGFHLGYLDGEVELVSGVVARLLALYNQGHIKPHIDSVWPFEKVADAMKQMQEKKNVGKVLLVPGPEKQN

SEQ ID NO: 46 - DNA, 2396 bp, Homo sapiens
  CDS (50)..(1228)
agctgtgcactctccatccagctgtgcgctctcgtcgggagtcccagccatgtccgacgagagagaggtagccgaggcagcgaccggggaagacgcctcttcgccgcctccgaaaaccgaggcagcgagcgacccccagcatcccgcggcctccgaaggggccgccgccgccgccgcctcgccgccactgctgcgctgcctagtgctcaccggctttggaggctacgacaaggtgaagctgcagagccggccggcagcgcccccggcccctgggcccggccagctgacgctgcgtctgcgggcctgcgggctcaacttcgcagacctcatggctaggcaggggctgtacgaccgtctcccgcctctgcctgtcactccgggcatggagggcgcgggtgttgtgatcgcagtgggcgagggagtcagcgaccgcaaggcaggagaccgggtgatggtgttgaaccggtcagggatgtggcaggaagaggtgactgtgccctcggtccagaccttcctgattcctgaggccatgacctttgaggaagctgctgccttgctcgtcaattacattacagcctacatggtcctctttgacttcggcaacctacagcctggccacagcgtcttggtacacatggctgcagggggtgtgggtatggctgccgtgcagctgtgccgtacagtggagaatgtgacagtgttcggaacggcctcggccagcaagcacgaggcactgaaggagaatggggtcacacatcccatcgactatcacacgactgactacgtggatgagatcaagaagatttcccctaaaggagtggacattgtcatggaccctctgggtgggtcagatactgccaagggctacaacctcctgaaacccatgggcaaagtcgtcacctatggaatggccaacctgctgacgggccccaaacggaacctgatggccctggcccggacatggtggaatcagttcagcgtgacagctctgcagctgctgcaggccaaccgggctgtgtgtggcttccacctgggctacctggatggtgaggtggagctggtcagtggtgtggtggcccgcctcctggctctgtacaaccagggccacatcaagccccacattgactcagtctggcccttcgagaaggtggctgatgccatgaaacagatgcaggagaagaagaatgtgggcaaggtcctcctggttccagggccagagaagcagaactagggcaagtggctgtgagaccctagagaccagcgaagggagaagttgggaagctacgttctgttggccaccagacttgcatttcagcctctgtcataatgctctgccctccctcccccgaagttctctgtggtgatgaccgctctcccctgcccctccccgcttcctgacctctgaagaggttgggaagtgaccatttggatgtctgggccctgccaaggcgacagggagggtcagagggaggccggctgcttcctgcccccaccctttccccgggcctgctgtgctgcttttgtgccaaggttagccagtcccccctgttgtgttccatgtgctttcacctctgcctcatctttcctcccgtccctgccccgccacctccccaaagaattgaaacgtcagctcaggatatggggccaatctctgtgagtccagcatgtacctgtctctccctagtgtcccttcagcctgggctgaccagtgcccgcctctgggcttgaccagttcccaatctcgtcctctgtccccaacttcttaagcacaattgggcttcttccatctccaggttttctgccattcttaaccaaggcagccccaagcctcctggggaggcagggcaaaaacaggtgccctcatcgtggtctgtgccatgtcccgtctctatggtggttgaggagaaaggcggggaagcttcctcagccttgcagatatgtgtggcatttactagccagagctctgaaaggcagtgctgtctgtttcttgtactgggaccaaagtaaaaatccaagcacattccccttgcagttaggggaggccctactgccttctcaaagcagagaggcagcttatcaaactcagcccaaaactctgtttacatgggtggggagatggagcagggaagtacagagtgggatggtcaggacctgggccattgcaaccaaaatggggacttcctgggtagggaggtcactccctctactcactgagctaggattagggagggttattgccccaaccattgcaatgggaggtggagggacaggctcagcctcctcattgtctaaatgaggcctaaatgtgtgaagtgcgatttctgcttttgtgtaccccaccaccccattaccacagctgcctttgtgtgtttgtgtcaataaaaagccaaaccctg

SEQ ID NO: 47 - protein, 138 aa, Homo sapiens
MISLTDTQKIGMGLTGFGVFFLFFGMILFFDKALLAIGNVLFVAGLAFVIGLERTFRFFFQKHKMKATGFFLGGVFVVLIGWPLIGMIFEIYGFFLLFRGFFPVVVGFIRRVPVLGSLLNLPGIRSFVDKVGESNNMV

SEQ ID NO: 48 - DNA, 2976 bp, Homo sapiens
  CDS (110)..(523)
agacgtggcggctctcgcctgggctgtttcccggcttcatttctcccgactcagcttcccaccctgggctttccgaggtgctgtcgccgctgtccccaccactgcagccatgatctccttaacggacacgcagaaaattggaatgggattaacaggatttggagtgtttttcctgttctttggaatgattctcttttttgacaaagcactactggctattggaaatgttttatttgtagccggcttggcttttgtaattggtttagaaagaacattcagattcttcttccaaaaacataaaatgaaagctacaggtttttttctgggtggtgtatttgtagtccttattggttggcctttgataggcatgatcttcgaaatttatggattttttctcttgttcaggggcttctttcctgtcgttgttggctttattagaagagtgccagtccttggatccctcctaaatttacctggaattagatcatttgtagataaagttggagaaagcaacaatatggtataacaacaagtgaatttgaagactcatttaaaatattgtgttatttataaagtcatttgaagaatattcagcacaaaattaaattacatgaaatagcttgtaatgttctttacaggagtttaaaacgtatagcctacaaagtaccagcagcaaattagcaaagaagcagtgaaaacaggcttctactcaagtgaactaagaagaagtcagcaagcaaactgagagaggtgaaatccatgttaatgatgcttaagaaactcttgaaggctatttgtgttgtttttccacaatgtgcgaaactcagccatccttagagaactgtggtgcctgtttcttttctttttattttgaaggctcaggagcatccataggcatttgctttttagaaatgtccactgcaatggcaaaaatatttccagttgcactgtatctctggaagtgatgcatgaattcgattggattgtgtcattttaaagtattaaaaccaaggaaaccccaattttgatgtatggattacttttttttgtaaacatggttaaaataaaacttctgtggttcttctgaatcttaatatttcaaagccaggtgaaaatctgaactagatattctttgttggaatatgcaaaggtcattctttactaacttttagttactaaattatagctaagttttgtcagcagcatactccggaaagtctcatacttcttgggagtctgccctcctaagtatctgtctatatcattcattacgtgtaagtatttaacaaaaaagcattcttgaccatgaatgaagtagtttgtttcatagcttgtctcattgaatagtattattgaagatactaaatgatgcaaaccaaatggattttttccatgtcatgatgtaatttttctttcttctttcttttttttaaattttagcagtggcttattatttgtttttcataaattaaaataacttttgataatgtttactttaagacatgtaacatgttaaaaggttaaacttatggctgtttttaaagggctattcatttaatctgagttttcccttattttcagctttttcctagcatataatagtcattaagcatgacatatccttcatatgatcactcatcttgagttaattagaaaatacctgagttcacgtgctaaagtcatttcactgtaataaactgactatggtttcttaagaacatgacactaaaaaaaaagtggtttttttccaccgttgctgattattagacagtaggaaatagctgttttctttagttttacaagatgtgacagctttagtggtagatgtagggaaacatttcaacagccatagtactatttgttttaccactgattgcactgttttgtttttttaacagttgcaaagctttttaatgcataaaagtataattgaaatctgtggtatttatttacaaacatgtctacaaaaatagattacagcttattttatttttagttaaatctcttaatacacagagaactcccaatcttgctcatctaaataaggaaagacttggtgtatagtgtgatggtttagtcttaaggattaagacatttttggtacttgcatttgacttacgatgtatctgtgaaaatgggatgatattgacaaatggagactcctacctcaatagttaatggaataataagaggctactgttgtgtctaatgttcttcaaaaaagtaatatcctcacttggagagtgtcaaatacatactttgaggattgactttatataaggtgccctgtagaactctgttacacatatttttgacccatattatttacaatgtcttgataattctacctttttagagcaagaatagtatctgctaatgtaagggacatctgtatttaactcctttgtagacatgaatttctatcaaaatgttctttgcactgtaacagagattccttttttcaataatcttaattcaaaagcattattagacttgaaagggtttgataatctcccagtccttagtaaagattgagagaggctggagcagttttcagttttaaatgagtctgcagttaatatcaaatgtgagtttgggactgcctggcaacatttatatttcttattcagaacccttgatgagactatttttaaacatactagtctgctgatagaaagcactatacatcctattgtttctttctttccaaaatcagccttctgtctgtaacaaaaatgtactttatagagatggaggaaaaggtctaatactacatagccttaagtgtttctgtcattgttcaagtgtattttctgtaacagaaacatatttggaatgtttttcttttccccttataaattgtaattcctgaaatactgctgctttaaaaagtcccactgtcagattatattatctaacaattgaatattgtaaatatacttgtcttacctctcaataaaagggtacttttctatt

SEQ ID NO: 49 - protein, 359 aa, Homo sapiens
MSKETIIKCEKQKPRFHAFLKINQAKPECGRQSLVELLIRPVQRLPSVALLLNDLKKHTADENPDKSTLEKAIGSLKEVMTHINEDKRKTEAQKQIFDVVYEVDGCPANLLSSHRSLVQRVETISLGEHPCDRGEQVTLFLFNDCLEIARKRHKVIGTFRSPHGQTRPPASLKHIHLMPLSQIKKVLDIRETEDCHNAFALLVRPPTEQANVLLSFQMTSDELPKENWLKMLCRHVANTICKADAENLIYTADPESFEVNTKDMDSTLSRASRAIKKTSKKVTRAFSFSKTPKRALRRALMTSHGSVEGRSPSSNDKHVMSRLSSTSSLAGIPSPSLVSLPSFFERRSHTLSRSTTHLI

SEQ ID NO: 50 - DNA, 2636 bp, Homo sapiens
  CDS (327)..(1403)
cttcaaagcagtcagcaaggtggcaagttgcaaaagagctttatcaaactgaaagtaattatgttaatatattggcaacaattattcagttatttcaagtaccattggaagaggaaggacaacgtggtggacctatccttgcaccagaggagattaagactatttttggtagcatcccagatatctttgatgtacacactaagataaaggatgatcttgaagaccttatagttaattgggatgagagcaaaagcattggtgacatttttctgaaatattcaaaagatttggtaaaaacctaccctccctttgtaaacttctttgaaatgagcaaggaaacaattattaaatgtgaaaaacagaaaccaagatttcatgcttttctcaagataaaccaagcaaaaccagaatgtggacggcagagccttgttgaacttcttatccgaccagtacagaggttacccagtgttgcattacttttaaatgatcttaagaagcatacagctgatgaaaatccagacaaaagcactttagaaaaagctattggatcactgaaggaagtaatgacgcatattaatgaggataagagaaaaacagaagctcaaaagcaaatttttgatgttgtttatgaagtagatggatgcccagctaatcttttatcttctcaccgaagcttagtacagcgggttgaaacaatttctctaggtgagcacccctgtgacagaggagaacaagtaactctcttcctcttcaatgattgcctagagatagcaagaaaacggcacaaggttattggcacttttaggagtcctcatggccaaacccgacccccagcttctcttaagcatattcacctaatgcctctttctcagattaagaaggtattggacataagagagacagaagattgccataatgcttttgccttgcttgtgaggccaccaacagagcaggcaaatgtgctactcagtttccagatgacatcagatgaacttccaaaagaaaactggctaaagatgctgtgtcgacatgtagctaacaccatttgtaaagcagatgctgagaatcttatttatactgctgatccagaatcctttgaagtaaatacaaaagatatggacagtacattgagtagagcatcaagagcaataaaaaagacttcaaaaaaggttacaagagcattctctttctccaaaactccaaaaagagctcttcgaagggctcttatgacatcccacggctcagtggagggaagaagtccttccagcaatgataagcatgtaatgagtcgtctttctagcacatcatcattagcaggtatcccttctccctcccttgtcagccttccttccttctttgaaaggagaagtcatacgttaagtagatctacaactcatttgatatgaagcgttaccaaaatcttaaattatagaaatgtatagacacctcatactcaaataagaaactgacttaaatggtacttgtaattagcacttggtgaaagctggaaggaagataaataacactaaactatgctatttgatttttcttcttgaaagagtaaggtttacctgttacattttcaagttaattcatgtaaaaaatgatagtgattttgatgtaatttatctcttgtttgaatctgtcattcaaaggccaataatttaagttgctatcagctgatattagtagctttgcaaccctgatagagtaaataaattttatgggcgggtgccaaatactgctgtgaatctatttgtatagtatccatgaatgaatttatggaaatagatatttgtgcagctcaatttatgcagagattaaatgacatcataatactggatgaaaacttgcatagaattctgattaaatagtgggtctgtttcacatgtgcagtttgaagtatttaaataaccactcctttcacagtttattttcttctcaagcgttttcaagatctagcatgtggattttaaaagatttgccctcattaacaagaataacatttaaaggagattgtttcaaaatatttttgcaaattgagataaggacagaaagattgagaaacattgtatattttgcaaaaacaagatgtttgtagctgtttcagagagagtacggtatatttatggtaattttatccactagcaaatcttgatttagtttgatagtgtgtggaattttattttgaaggataagaccatgggaaaattgtggtaaagactgtttgtacccttcatgaaataattctgaagttgccatcagttttactaatcttctgtgaaatgcatagatatgcgcatgttcaactttttattgtggtcttataattaaatgtaaaattgaaaattcatttgctgtttcaaagtgtgatatctttcacaatagcctttttatagtcagtaattcagaataatcaagttcatatggataaatgcatttttatttcctatttctttagggagtgctacaaatgtttgtcacttaaatttcaagtttctgttttaatagttaactgactatagattgttttctatgccatgtatgtgccacttctgagagtagtaaatgactctttgctacattttaaaagcaattgtattagtaagaactttgtaaataaatacctaaaaccc

SEQ ID NO: 51 - protein, 883 aa, Homo sapiens
MAENSVLTSTTGRTSLADSSIFDSKVTEISKENLLIGSTSYVEEEMPQIETRVILVQEAGKQEELTKALKDIKVGFVKMESVEEFEGLDSPEFENVFVVTDFQDSVFNDLYKADCRVIGPPVVLNCSQKGEPLPFSCRPLYCTSMMNLVLCFTGFRKKEELVRLVTLVHHMGGVIRKDFNSKVTHLVANCTQGEKFRVAVSLGTPIMKPEWIYKAWERRNEQDFYAAVDDFRNEFKVPPFQDCIFSFLGFSDEEKTNMEEMTEMQGGKYLPLGDERCTHLVVEENIVKDLPFEPSKKLYVVKQEWFWGSIQMDARAGETMYLYEKANTPELKKSVSMLSLNTPNSNRKRRRLKETLAQLSRDTDVSPFPPRKRPSAEHSLSIGSLLDISNTPESSINYGDTPKSCTKSSKSSTPVPSKQSARWQVAKELYQTESNYVNILATIIQLFQVPLEEEGQRGGPILAPEEIKTIFGSIPDIFDVHTKIKDDLEDLIVNWDESKSIGDIFLKYSKDLVKTYPPFVNFFEMSKETIIKCEKQKPRFHAFLKINQAKPECGRQSLVELLIRPVQRLPSVALLLNDLKKHTADENPDKSTLEKAIGSLKEVMTHINEDKRKTEAQKQIFDVVYEVDGCPANLLSSHRSLVQRVETISLGEHPCDRGEQVTLFLFNDCLEIARKRHKVIGTFRSPHGQTRPPASLKHIHLMPLSQIKKVLDIRETEDCHNAFALLVRPPTEQANVLLSFQMTSDELPKENWLKMLCRHVANTICKADAENLIYTADPESFEVNTKDMDSTLSRASRAIKKTSKKVTRAFSFSKTPKRALRRALMTSHGSVEGRSPSSNDKHVMSRLSSTSSLAGIPSPSLVSLPSFFERRSHTLSRSTTHLI

SEQ ID NO: 52 - DNA, 3910 bp, Homo sapiens
  CDS (29)..(2677)
agagtgctgatttagaagaatacaaatcatggctgaaaatagtgtattaacatccactactgggaggactagcttggcagactcttccatttttgattctaaagttactgagatttccaaggaaaacttacttattggatctacttcatatgtagaagaagagatgcctcagattgaaacaagagtgatattggttcaagaagctggaaaacaagaagaacttacaaaagccttaaaggacattaaagtgggctttgtaaagatggagtcagtggaagaatttgaaggtttggattctccggaatttgaaaatgtatttgtagtcacggactttcaggattctgtctttaatgacctctacaaggctgattgtagagttattggaccaccagttgtattaaattgttcacaaaaaggagagcctttgccattttcatgtcgcccgttgtattgtacaagtatgatgaatctagtactatgctttactggatttaggaaaaaagaagaactagtcaggttggtgacattggtccatcacatgggtggagttattcgaaaagactttaattcaaaagttacacatttggtggcaaattgtacacaaggagaaaaattcagggttgctgtgagtctaggtactccaattatgaagccagaatggatttataaagcttgggaaaggcggaatgaacaggatttctatgcagcagttgatgactttagaaatgaatttaaagttcctccatttcaagattgtatttttagtttcctgggattttcagatgaagagaaaaccaatatggaagaaatgactgaaatgcaaggaggtaaatatttaccgcttggagatgaaagatgcactcaccttgtagttgaagagaatatagtaaaagatcttccctttgaaccttcaaagaaactttatgttgtcaagcaagagtggttctggggaagcattcaaatggatgcccgagctggagaaactatgtatttatatgaaaaggcaaatactcctgagctcaagaaatcagtgtcaatgctttctctaaatacccctaacagcaatcgcaaacgacgtcgtttaaaagaaacacttgctcagctttcaagagatacagacgtgtcaccatttccaccccgtaagcgcccatcagctgagcattccctttccatagggtcactcctagatatctccaacacaccagagtctagcattaactatggagacaccccaaagtcttgtactaagtcttctaaaagctccactccagttccttcaaagcagtcagcaaggtggcaagttgcaaaagagctttatcaaactgaaagtaattatgttaatatattggcaacaattattcagttatttcaagtaccattggaagaggaaggacaacgtggtggacctatccttgcaccagaggagattaagactatttttggtagcatcccagatatctttgatgtacacactaagataaaggatgatcttgaagaccttatagttaattgggatgagagcaaaagcattggtgacatttttctgaaatattcaaaagatttggtaaaaacctaccctccctttgtaaacttctttgaaatgagcaaggaaacaattattaaatgtgaaaaacagaaaccaagatttcatgcttttctcaagataaaccaagcaaaaccagaatgtggacggcagagccttgttgaacttcttatccgaccagtacagaggttacccagtgttgcattacttttaaatgatcttaagaagcatacagctgatgaaaatccagacaaaagcactttagaaaaagctattggatcactgaaggaagtaatgacgcatattaatgaggataagagaaaaacagaagctcaaaagcaaatttttgatgttgtttatgaagtagatggatgcccagctaatcttttatcttctcaccgaagcttagtacagcgggttgaaacaatttctctaggtgagcacccctgtgacagaggagaacaagtaactctcttcctcttcaatgattgcctagagatagcaagaaaacggcacaaggttattggcacttttaggagtcctcatggccaaacccgacccccagcttctcttaagcatattcacctaatgcctctttctcagattaagaaggtattggacataagagagacagaagattgccataatgcttttgccttgcttgtgaggccaccaacagagcaggcaaatgtgctactcagtttccagatgacatcagatgaacttccaaaagaaaactggctaaagatgctgtgtcgacatgtagctaacaccatttgtaaagcagatgctgagaatcttatttatactgctgatccagaatcctttgaagtaaatacaaaagatatggacagtacattgagtagagcatcaagagcaataaaaaagacttcaaaaaaggttacaagagcattctctttctccaaaactccaaaaagagctcttcgaagggctcttatgacatcccacggctcagtggagggaagaagtccttccagcaatgataagcatgtaatgagtcgtctttctagcacatcatcattagcaggtatcccttctccctcccttgtcagccttccttccttctttgaaaggagaagtcatacgttaagtagatctacaactcatttgatatgaagcgttaccaaaatcttaaattatagaaatgtatagacacctcatactcaaataagaaactgacttaaatggtacttgtaattagcacttggtgaaagctggaaggaagataaataacactaaactatgctatttgatttttcttcttgaaagagtaaggtttacctgttacattttcaagttaattcatgtaaaaaatgatagtgattttgatgtaatttatctcttgtttgaatctgtcattcaaaggccaataatttaagttgctatcagctgatattagtagctttgcaaccctgatagagtaaataaattttatgggcgggtgccaaatactgctgtgaatctatttgtatagtatccatgaatgaatttatggaaatagatatttgtgcagctcaatttatgcagagattaaatgacatcataatactggatgaaaacttgcatagaattctgattaaatagtgggtctgtttcacatgtgcagtttgaagtatttaaataaccactcctttcacagtttattttcttctcaagcgttttcaagatctagcatgtggattttaaaagatttgccctcattaacaagaataacatttaaaggagattgtttcaaaatatttttgcaaattgagataaggacagaaagattgagaaacattgtatattttgcaaaaacaagatgtttgtagctgtttcagagagagtacggtatatttatggtaattttatccactagcaaatcttgatttagtttgatagtgtgtggaattttattttgaaggataagaccatgggaaaattgtggtaaagactgtttgtacccttcatgaaataattctgaagttgccatcagttttactaatcttctgtgaaatgcatagatatgcgcatgttcaactttttattgtggtcttataattaaatgtaaaattgaaaattcatttgctgtttcaaagtgtgatatctttcacaatagcctttttatagtcagtaattcagaataatcaagttcatatggataaatgcatttttatttcctatttctttagggagtgctacaaatgtttgtcacttaaatttcaagtttctgttttaatagttaactgactatagattgttttctatgccatgtatgtgccacttctgagagtagtaaatgactctttgctacattttaaaagcaattgtattagtaagaactttgtaaataaatacctaaaaccc

SEQ ID NO: 53 - protein, 622 aa, Homo sapiens
MEGPGLGSQCRNHSHGPHPPGFGRYGICAHENKELANAREALPLIEDSSNCDIVKATQYGIFERCKELVEAGYDVRQPDKENVSLLHWAAINNRLDLVKFYISKGAVVDQLGGDLNSTPLHWAIRQGHLPMVILLLQHGADPTLIDGEGFSSIHLAVLFQHMPIIAYLISKGQSVNMTDVNGQTPLMLSAHKVIGPEPTGFLLKFNPSLNVVDKIHQNTPLHWAVAAGNVNAVDKLLEAGSSLDIQNVKGETPLDMALQNKNQLIIHMLKTEAKMRANQKFRLWRWLQKCELFLLLMLSVITMWAIGYILDFNSDSWLLKGCLLVTLFFLTSLFPRFLVGYKNLVYLPTAFLLSSVFWIFMTWFILFFPDLAGAPFYFSFIFSIVAFLYFFYKTWATDPGFTKASEEEKKVNIITLAETGSLDFRTFCTSCLIRKPLRSLHCHVCNCCVARYDQHCLWTGRCIGFGNHHYYIFFLFFLSMVCGWIIYGSFIYLSSHCATTFKEDGLWTYLNQIVACSPWVLYILMLATFHFSWSTFLLLNQLFQIAFLGLTSHERISLQKQSKHMKQTLSLRKTPYNLGFMQNLADFFQCGCFGLVKPCVVDWTSQYTMVFHPAREKVLRSV

SEQ ID NO: 54 - DNA, 2426 bp, Homo sapiens
  CDS (104)..(1969)
gcgccagcaggaagtgggagaagaggcgacccaaggcgggctggcgggctggcggcagtcgctacttgcctagtagcctcagccgctgtgggctcctggggagatggaggggccggggctgggctcgcagtgcaggaatcacagccatggcccccaccctccaggatttggtcgatatggcatctgtgcacatgaaaacaaagaacttgccaatgcaagagaagctcttcctcttatagaggactctagtaactgtgacattgtcaaagctactcaatacggaatttttgaacgatgtaaagagttggtagaagcaggatatgatgtcaggcaaccagataaagaaaatgtgtcgcttcttcattgggctgctattaacaacagactggatcttgtaaagttttatatttcaaaaggtgctgttgtagatcagttgggtggagatttaaattcaactcctcttcactgggccatccgacaaggacatttacctatggtcatattattactccagcatggtgcagaccccactcttattgatggagagggattcagcagcatccacctggcagtattgtttcaacacatgcctattatagcatatctcatctcaaagggacagagtgtgaatatgacagatgtaaatgggcagacacctctcatgttatcagctcacaaagtaattgggccagaaccaactggatttcttttaaagtttaatccttctctcaatgtggttgataaaatacaccaaaacactccacttcactgggcagttgcagcaggaaatgttaatgcagttgataagcttttggaagctggttctagcctggatatccagaatgttaagggagaaacacctcttgatatggctctacaaaacaaaaatcagctcattattcatatgctaaaaacagaagccaaaatgagagccaaccaaaagttcagactttggaggtggctgcagaaatgcgagctcttcctgctgctgatgctttctgtgattaccatgtgggctattggatacatattggacttcaattcagattcttggcttttaaaaggatgtcttctagtaacactgttttttctgacatctttgtttccaaggttcttggttgggtataagaaccttgtatacttaccaacagcctttctgctaagttctgttttttggatatttatgacttggttcatcttattttttcctgatttagcaggagcccctttctatttcagtttcattttcagcatagtagcctttctatactttttctataagacttgggcaactgatccaggcttcactaaggcttctgaagaagaaaagaaagtgaatatcatcacccttgcagaaactggctctctggacttcagaacattttgtacatcatgtcttataaggaagccattaaggtcactccactgccatgtatgcaactgctgtgtggctcgatatgatcaacactgcctgtggactggacggtgcataggttttggcaaccatcactattacatattcttcttgtttttcctttccatggtatgtggctggattatatatggatctttcatctatttgtccagtcattgtgccacaacattcaaagaagatggattatggacttacctcaatcagattgtggcctgttccccttgggttttatatatcttgatgctagcaactttccatttctcatggtcaacatttttattattaaatcaactctttcagattgcctttctgggcctgacctcccatgagagaatcagcctgcagaagcagagcaagcatatgaaacagacgttgtccctcaggaagacaccatacaatcttggattcatgcagaacctggcagatttctttcagtgtggctgctttggcttggtgaagccctgtgtggtagattggacatcacagtacaccatggtctttcacccagccagggagaaggttcttcgctcagtatgaagaaaagcaacccaaaactctcaatctgatttgtttttgtttatgtcgatgccctgtagtttgaaagtgaagtaaagatttagaattcacctaagtccaaaggaaaacacgtggtttttaaagccattaggtaaaaaaagttctcaataaaggcattacaattttttaggtttagaaagatggacttttctgataaatcttggcagacatctaaaaaaaaaaccatatttttcacaagaaaatgcaagttactttttttggaaataatactcactgattatggataaaatggaatattttcagatactatattggctgtttcaaaatagtactattctttaaacttgtaatttttgctaagttatttgtctttgttgtatctataaatatgtaaaaaatatttaaatagatgtacctgttttgctttcacacttaataaaaaatttttttttgt

SEQ ID NO: 55 - protein, 257 aa, Homo sapiens
MASKIGSRRWMLQLIMQLGSVLLTRCPFWGCFSQLMLYAERAEARRKPDIPVPYLYFDMGAAVLCASFMSFGVKRRWFALGAALQLAISTYAAYIGGYVHYGDWLKVRMYSRTVAIIGGFLVLASGAGELYRRKPRSRSLQSTGQVFLGIYLICVAYSLQHSKEDRLAYLNHLPGGELMIQLFFVLYGILALAFLSGYYVTLAAQILAVLLPPVMLLIDGNVAYWHNTRRVEFWNQMKLLGESVGIFGTAVILATDG

SEQ ID NO: 56 - DNA, 1520 bp, Homo sapiens
  CDS (10)..(780)
tttcccaagatggcgtcgaagataggttcgagacggtggatgttgcagctgatcatgcagttgggttcggtgctgctcacacgctgccccttttggggctgcttcagccagctcatgctgtacgctgagagggctgaggcacgccggaagcccgacatcccagtgccttacctgtatttcgacatgggggcagccgtgctgtgcgctagtttcatgtcctttggcgtgaagcggcgctggttcgcgctgggggccgcactccaattggccattagcacctacgccgcctacatcgggggctacgtccactacggggactggctgaaggtccgtatgtactcgcgcacagttgccatcatcggcggctttcttgtgttggccagcggtgctggggagctgtaccgccggaaacctcgcagccgctccctgcagtccaccggccaggtgttcctgggtatctacctcatctgtgtggcctactcactgcagcacagcaaggaggaccggctggcgtatctgaaccatctcccaggaggggagctgatgatccagctgttcttcgtgctgtatggcatcctggccctggcctttctgtcaggctactacgtgaccctcgctgcccagatcctggctgtactgctgccccctgtcatgctgctcattgatggcaatgttgcttactggcacaacacgcggcgtgttgagttctggaaccagatgaagctccttggagagagtgtgggcatcttcggaactgctgtcatcctggccactgatggctgagttttatggcaagaggctgagatgggcacagggagccactgagggtcaccctgccttcctccttgctggcccagctgctgtttatttatgctttttggtctgtttgtttgatcttttgcttttttaaaattgttttttgcagttaagaggcagctcatttgtccaaatttctgggctcagcgcttgggagggcaggagccctggcactaatgctgtacaggtttttttcctgttaggagagctgaggccagctgcccactgagtctcctgtccctgagaagggagtatggcagggctgggatgcggctactgagagtgggagagtgggagacagaggaaggaagatggagattggaagtgagcaaatgtgaaaaattcctctttgaacctggcagatgcagctaggctctgcagtgctgtttggagactgtgagagggagtgtgtgtgttgacacatgtggatcaggcccaggaagggcacaggggctgagcactacagaagtcacatgggttctcagggtatgccaggggcagaaacagtaccggctctctgtcactcaccttgagagtagagcagaccctgttctgctctgggctgtgaaggggtggagcaggcagtggccagctttgcccttcctgctgtctctgtttctagctccatggttggcctggtgggggtggagttccctcccaaacaccagaccacacagtcctccaaaaataaacattttatatag

SEQ ID NO: 57 - protein, 107 aa, Homo sapiens
MALFAGGKLRVHLDIQVGEHANNYPEIAAKDKLTELQLRARQLLDQVEQIQKEQDYQRYREERFRLTSESTNQRVLWWSIAQTVILILTGIWQMRHLKSFFEAKKLV

SEQ ID NO: 58 - DNA, 1496 bp, Homo sapiens
  CDS (9)..(329)
ctaccaggatggctctcttcgctggtggcaaactgcgtgtgcatctcgacatccaggttggggagcatgccaacaactaccctgagattgctgcaaaagataagctgacggagctacagctccgcgcccgccagttgcttgatcaggtggaacagattcagaaggagcaggattaccaaaggtatcgtgaagagcgcttccgactgacgagcgagagcaccaaccagagggtcctatggtggtccattgctcagactgtcatcctcatcctcactggcatctggcagatgcgtcacctcaagagcttctttgaggccaagaagctggtgtagtgccctctttgtatgacccttcctttttacctcatttatttggtactttccccacacagtcctttatccacctggatttttagggaaaaaaaatgaaaaagaataagtcacattggttccatggccacaaaccattcagatcagccacttgctgaccctggttcttaaggacacatgacattagtccaatctttcaaaatcttgtcttagggcttgtgaggaatcagaactaacccaggactcagtcctgcttcttttgcctcgagtgattttcctctgtttttcactaaataagcaaatgaaaactctctccattaccttctgctttctctttgtccacttacgcagtaggtgactggcatgtgccacagagcaggccctgcctcactgtctgctggtcagttctgggttcacttaatggctttgtgaatgtaaataaggggcaggtcttggccctagaggattgagatgtttttctatatcttagaactatttttggataaattatatattttccttcctagtagaagtgttactgcctgtaactagctcaaaataccaatgcagtttctgcattctgggttttgtttttcttttttttttttttttttttgagttttgctcttgtcgcccaggctggagtgcaatggcgtgatctcagctcactggcaacatctgcctcccgggttcaaatgattctcctgcctcagtctcctgagtagctgggattacaggtgcccgccaccacgctcagctaatttttgtatttttagtagagatggggttttaccatgttggccaggctggtcttagactcctgacctcagttgatccacctgcctcagcctctgcattcagtttattcacatatttttggtaactcccatggcagctcctaggatttcagcggtctgtgggccagaaagcaggcaccagggctgacctcaaggccgtatcagagggccaagcagagttcttttggatacctgcttttcatcccacagggccttagagtcagaggtaaggtagcaacagagctagaatggggcaatgcactcttaccctccttctcaacttttatttaagctgtgctaaatgttttcttcaagggaaccagatttagttctttacagaattttccagtgaaataaaacatgttgtaat

SEQ ID NO: 59 - protein, 272 aa, Homo sapiens
MMIHGFQSSHRDFCFGPWKLTASKTHIMKSADVEKLADELHMPSLPEMMFGDNVLRIQHGSGFGIEFNATDALRCVNNYQGMLKVACAEEWQESRTEGEHSKEVIKPYDWTYTTDYKGTLLGESLKLKVVPTTDHIDTEKLKAREQIKFFEEVLLFEDELHDHGVSSLSVKIRVMPSSFFLLLRFFLRIDGVLIRMNDTRLYHEADKTYMLREYTSRESKISSLMHVPPSLFTEPNEISQYLPIKEAVCEKLIFPERIDPNPADSQKSTQVE

SEQ ID NO: 60 - DNA, 1916 bp, Homo sapiens
  CDS (117)..(932)
atggtaacggctcggaagcctaggaggctgggccggagggaggcggaggaaccggtgttcgccgccgccgctgcttcagcttattccttgtggcctctgcgggtcctgcctcagccatgatgatccacggcttccagagcagccaccgggatttctgcttcgggccctggaagctgacggcgtccaagacccacatcatgaagtcggcggatgtggagaaattagccgatgaattacatatgccatctctccctgaaatgatgtttggagacaacgttttaagaatccagcatgggtctggctttggaattgagttcaatgctacagatgcgttaagatgtgtaaacaactaccaaggaatgcttaaagtggcctgtgctgaagagtggcaagaaagcaggacggagggtgaacactccaaagaggttattaaaccatatgattggacctatacaacagattataagggaaccttacttggagaatctcttaagttaaaggttgtacctacaacagatcatatagatacagaaaaattgaaagccagagaacagattaagttttttgaagaagttctcctttttgaggatgaacttcatgatcatggagtttcaagcctgagtgtgaagattagagtaatgccttctagctttttcctgctgttgcggtttttcttgagaattgatggggtgcttatcagaatgaatgacacgagactttaccatgaggctgacaagacctacatgttacgagaatatacgtcacgagaaagcaaaatttctagtttgatgcatgttccaccttccctcttcacggaacctaatgaaatatcccagtatttaccaataaaggaagcagtttgtgagaagctaatatttccagaaagaattgatcctaacccagcagactcacaaaaaagtacacaagtggaataaaatgtgatacaacatatactcactatggaatctgactggacaccttggctatttgtaaggggttatttttattatgagaattaattgccttgtttatgtacagattttctgtagccttaaaggaaaaaaaaataaagatcgttacaggcaggtttcactcaactgctatttgtactgtctgtcttcacattcatattccagatttatattttctggagttaaatttggatgatttctaaattatcacaaagtgggacctcagcagtagtgatgtgtgtgtctcatgagcagtgagcacagtctgcattcatcatgaaacactatcttctaccaggaggaggttaatgtaaatcaccaaatcccaatgccttgtgactttcataggattcctgatcatgcatgttgatgtactggctcttcactttgggctttctgatgtttattcacacctttggagagttgcaacttgccacatacgaaattagtctcatagtgtagtgaacttcaaccccaaaattttaaaaatgtatttccccccagttttaaattgcctttgaaatttaaaaaaaaaaatttagacttagtaccagaaccaaaaatacctagatttttggagaacttattacatacatagaaacatgaatatggtttaccwctgtgtgtgtgtgtgtgtgtgtgtgtatacagacttttttttttaacttgttgattcagatgtcttggtccctgaatagtcctagattacttattttgagaattgattgttaaaaattacagggaattaaaataattgcctttttttttttagagggtaagagatgggtagaagagtatgcctctgaaaattttattagtttattcttgtggagaataccaagaaaatgtgtatttgcccattgctaaatatgatatatgccattttgtatttatttgtcccaagtgtctttttttaagaggagaataaacaataaggaattactg

SEQ ID NO: 61 - protein, 219 aa, Homo sapiens
MNRLFGKAKPKAPPPSLTDCIGTVDSRAESIDKKISRLDAELVKYKDQIKKMREGPAKNMVKQKALRVLKQKRMYEQQRDNLAQQSFNMEQANYTIQSLKDTKTTVDAMKLGVKEMKKAYKQVKIDQIEDLQDQLEDMMEDANEIQEALSRSYGTPELDEDDLEAELDALGDELLADEDSSYLDEAASAPAIPEGVPTDTKNKDGVLVDEFGLPQIPAS

SEQ ID NO: 62 - DNA, 1362 bp, Homo sapiens
  CDS (49)..(705)
gttttctggttttgctctagtgtttgggtttcttcgcggctgctcaagatgaaccgactcttcgggaaagcgaaacccaaggctccgccgcccagcctgactgactgcattggcacggtggacagtagagcagaatccattgacaagaagatttctcgattggatgctgagctagtgaagtataaggatcagatcaagaagatgagagagggtcctgcaaagaatatggtcaagcagaaagccttgcgagttttaaagcaaaagaggatgtatgagcagcagcgggacaatcttgcccaacagtcattcaacatggaacaagccaattataccatccagtctttgaaggacaccaagaccacggttgatgctatgaaactgggagtaaaggaaatgaagaaggcatacaagcaagtgaagatcgaccagattgaggatttacaagaccagctagaggatatgatggaagatgcaaatgaaatccaagaagcactgagtcgcagttatggcaccccagaactggatgaagatgatttagaagcagagttggatgcactaggtgatgagcttctggctgatgaagacagttcttatttggatgaggcagcatctgcacctgcaattccagaaggtgttcccactgatacaaaaaacaaggatggagttctggtggatgaatttggattgccacagatccctgcttcatagatttgcatcattcaagcatatcttgtaaaacaaacacatattatgggactaggaaatatttatctttccaaatttgccataacagatttaggtttctttcctttctttgaaggaaagtttaattacattgctcttttattttttccattaagagactcattgcttgggaaatgctttcttcgtactaaaatttgattccttttttttcttatgaaaaacgaactcagtttaaaagtatttttagctcgtatgacttgttttcattcattaataataatttgaaataaaactaaggaaatggaatcttaaaagtctatgacagtgtaactctacagtctcaaaatgacctgataaattgataagacaaagatgagattattggggctgttcatattatgattcagaatcattttctattgtggtattataggttggttaaagtgatggcctttttgatgggttttgttgtgtcttgtgaacaagtcgttactgtgtccattattggaatggaattatcactactgtatcatgagtgggtattttgattctatggttccctcagtattacatcttgacttgtaatcaattatgaatatttcttgatatttaatgtataggacatttatttatactcaataaatatttttcaaaagg

SEQ ID NO: 63 - protein, 622 aa, Homo sapiens
MADGPDEYDTEAGCVPLLHPEEIKPQSHYNHGYGEPLGRKTHIDDYSTWDIVKATQYGIYERCRELVEAGYDVRQPDKENVTLLHWAAINNRIDLVKYYISKGAIVDQLGGDLNSTPLHWATRQGHLSMVVQLMKYGADPSLIDGEGCSCIHLAAQFGHTSIVAYLIAKGQDVDMMDQNGMTPLMWAAYRTHSVDPTRLLLTFNVSVNLGDKYHKNTALHWAVLAGNTTVISLLLEAGANVDAQNIKGESALDLAKQRKNVWMINHLQEARQAKGYDNPSFLRKLKADKEFRQKVMLGTPFLVIWLVGFIADLNIDSWLIKGLMYGGVWATVQFLSKSFFDHSMHSALPLGIYLATKFWMYVTWFFWFWNDLNFLFIHLPFLANSVALFYNFGKSWKSDPGIIKATEEQKKKTIVELAETGSLDLSIFCSTCLIRKPVRSKHCGVCNRCIAKFDHHCPWVGNCVGAGNHRYFMGYLFFLLFMICWMIYGCISYWGLHCETTYTKDGFWTYITQIATCSPWMFWMFLNSVFHFMWVAVLLMCQMYQISCLGITTNERMNARRYKHFKVTTTSIESPFNHGCVRNIIDFFEFRCCGLFRPVIVDWTRQYTIEYDQISGSGYQLV

SEQ ID NO: 64 - DNA, 2948 bp, Homo sapiens
  CDS (14)..(1879)
atttaacaccaagatggcggacggcccggatgagtacgataccgaagcgggctgtgtgccccttctccacccagaggaaatcaaaccccaaagccattataaccatggatatggtgaacctcttggacggaaaactcatattgatgattacagcacatgggacatagtcaaggctacacaatatggaatatatgaacgctgtcgagaattggtggaagcaggttatgatgtacggcaaccggacaaagaaaatgttaccctcctccattgggctgccatcaataacagaatagatttagtcaaatactatatttcgaaaggtgctattgtggatcaacttggaggggacctgaattcaactccattgcactgggccacaagacaaggccatctatccatggttgtgcaactaatgaaatatggtgcagatccttcattaattgatggagaaggatgtagctgtattcatctggctgctcagttcggacatacctcaattgttgcttatctcatagcaaaaggacaggatgtagatatgatggatcagaatggaatgacgcctttaatgtgggcagcatatagaacacatagtgtggatccaactagattgcttttaacattcaatgtttcagttaaccttggtgacaagtatcacaaaaacactgctctgcattgggcagtgctagcagggaataccacagtcattagccttcttctggaagctggagctaatgttgatgcccagaatatcaagggcgaatcagcgcttgatttggcaaaacagagaaaaaatgtgtggatgatcaaccacttacaagaggcaaggcaagcaaaaggatatgacaatccgtccttccttagaaagctgaaagctgataaggaatttcggcagaaagtaatgttaggaactcctttcctagttatttggctggttgggtttatagcagacctaaatattgattcttggctcattaaagggctaatgtatggtggtgtttgggctacagtacagtttctttcaaaatcctttttcgatcattcaatgcatagtgcattgccccttgggatatatttggcaaccaaattctggatgtatgtgacgtggttcttctggttttggaatgatctcaactttttatttatccatcttccattccttgccaatagtgttgcacttttctacaattttggaaaatcttggaaatcagatccagggattattaaagcaacagaagagcaaaagaaaaagacaatagttgaacttgcagagacaggaagtctggacctcagtatattctgcagtacctgtttgatacgaaaaccggtgaggtccaaacattgtggtgtgtgcaaccgctgtatagcaaaatttgatcatcattgcccatgggtgggtaactgtgtaggtgcaggcaaccatagatattttatgggctacctattcttcttgctttttatgatctgctggatgatttatggttgtatatcttactggggactccactgtgagaccacttacaccaaggatggattttggacatacattactcagattgccacgtgttcaccttggatgttttggatgttcctgaacagtgttttccacttcatgtgggtggctgtattactcatgtgtcagatgtaccagatatcatgtttaggtattactacaaatgaaagaatgaatgccaggagatacaagcactttaaagtcacaacaacgtctattgaaagcccattcaaccatggatgtgtaagaaatattatagacttctttgaatttcgatgctgtggcctctttcgtcctgttatcgtggactggaccaggcagtatacaatagaatatgaccaaatatcaggatctgggtaccagctggtgtagcgacatcttatcctatgaagcatattgctgagtggtgcctgaaaattgtgtctgtccgtgtctttctcacactcgaatccacatcctttgaacaagagcatgctatgtgtagggctaatggtgaattttacagtctttttttcaacacttttattaacaaaagtaaacatggacagaacacactgccatttctgggaagagtaaagatgataaaaaataattttaatggttcttaatgtggaaattcacaacatactcaacttttgggttttgttctcacagtatttttcacaaaaaaagggtaaacttattctattgacagacatggtgtactgatcagaaatgttcagttttaactaaaactaaatttatgttatttggctaaatgttatgatgcagtctagtacgagtattgcatctaattccaggagcattgttttaagttgattgactagttattatgtacatttcagaatgtacacataaatactgtgatgaaaatcatgtgattgggatctactgtgatgttgtcttcaaaggcaggagaaaataatgttcacaataaaatgtgctaacaatgttttgtttctatcagctgttgcaatgctgatatatttctagttcagtgaaataatttgtagtaaccttactctgaggttttacggtctgataatgaagcacttgcatgagtatagtaagtcatgtttttttgttcaaatttaaaagccctgctaattgcatgacacaccacatagaatgtatactagcagatactatccagtgaagcataaattagaatttaatttgatgttcaaaaacagttccatttttaagggttaaggtggtattttcaagaaaaggcagaacaaataatgcaaaattctcagtaatagtgatacatggatatacttccttttaaattctcagctgcaaaataattgtagacaaaataatggcatttaactaaagatggagcatgatctgtgtacatagcacatgtgaataaaagaaaagctgacagtatattctggtttcaataaaatgacctatcagaaagtagaatttc

SEQ ID NO: 65 - protein, 632 aa, Homo sapiens
MQREEGFNTKMADGPDEYDTEAGCVPLLHPEEIKPQSHYNHGYGEPLGRKTHIDDYSTWDIVKATQYGIYERCRELVEAGYDVRQPDKENVTLLHWAAINNRIDLVKYYISKGAIVDQLGGDLNSTPLHWATRQGHLSMVVQLMKYGADPSLIDGEGCSCIHLAAQFGHTSIVAYLIAKGQDVDMMDQNGMTPLMWAAYRTHSVDPTRLLLTFNVSVNLGDKYHKNTALHWAVLAGNTTVISLLLEAGANVDAQNIKGESALDLAKQRKNVWMINHLQEARQAKGYDNPSFLRKLKADKEFRQKVMLGTPFLVIWLVGFIADLNIDSWLIKGLMYGGVWATVQFLSKSFFDHSMHSALPLGIYLATKFWMYVTWFFWFWNDLNFLFIHLPFLANSVALFYNFGKSWKSDPGIIKATEEQKKKTIVELAETGSLDLSIFCSTCLIRKPVRSKHCGVCNRCIAKFDHHCPWVGNCVGAGNHRYFMGYLFFLLFMICWMIYGCISYWGLHCETTYTKDGFWTYITQIATCSPWMFWMFLNSVFHFMWVAVLLMCQMYQISCLGITTNERMNARRYKHFKVTTTSIESPFNHGCVRNIIDFFEFRCCGLFRPVIVDWTRQYTIEYDQISGSGYQLV

SEQ ID NO: 66 - DNA, 4715 bp, Homo sapiens
  CDS (108)..(2003)
gaagaaggaggaggaggcccgcgtcgcctccggcggggctcgcgctcgccccgcgctcgccctccgcctcgcccgagccccgggagggtgaaacgctttctcccagcatgcagcgggaggagggatttaacaccaagatggcggacggcccggatgagtacgataccgaagcgggctgtgtgccccttctccacccagaggaaatcaaaccccaaagccattataaccatggatatggtgaacctcttggacggaaaactcatattgatgattacagcacatgggacatagtcaaggctacacaatatggaatatatgaacgctgtcgagaattggtggaagcaggttatgatgtacggcaaccggacaaagaaaatgttaccctcctccattgggctgccatcaataacagaatagatttagtcaaatactatatttcgaaaggtgctattgtggatcaacttggaggggacctgaattcaactccattgcactgggccacaagacaaggccatctatccatggttgtgcaactaatgaaatatggtgcagatccttcattaattgatggagaaggatgtagctgtattcatctggctgctcagttcggacatacctcaattgttgcttatctcatagcaaaaggacaggatgtagatatgatggatcagaatggaatgacgcctttaatgtgggcagcatatagaacacatagtgtggatccaactagattgcttttaacattcaatgtttcagttaaccttggtgacaagtatcacaaaaacactgctctgcattgggcagtgctagcagggaataccacagtcattagccttcttctggaagctggagctaatgttgatgcccagaatatcaagggcgaatcagcgcttgatttggcaaaacagagaaaaaatgtgtggatgatcaaccacttacaagaggcaaggcaagcaaaaggatatgacaatccgtccttccttagaaagctgaaagctgataaggaatttcggcagaaagtaatgttaggaactcctttcctagttatttggctggttgggtttatagcagacctaaatattgattcttggctcattaaagggctaatgtatggtggtgtttgggctacagtacagtttctttcaaaatcctttttcgatcattcaatgcatagtgcattgccccttgggatatatttggcaaccaaattctggatgtatgtgacgtggttcttctggttttggaatgatctcaactttttatttatccatcttccattccttgccaatagtgttgcacttttctacaattttggaaaatcttggaaatcagatccagggattattaaagcaacagaagagcaaaagaaaaagacaatagttgaacttgcagagacaggaagtctggacctcagtatattctgcagtacctgtttgatacgaaaaccggtgaggtccaaacattgtggtgtgtgcaaccgctgtatagcaaaatttgatcatcattgcccatgggtgggtaactgtgtaggtgcaggcaaccatagatattttatgggctacctattcttcttgctttttatgatctgctggatgatttatggttgtatatcttactggggactccactgtgagaccacttacaccaaggatggattttggacatacattactcagattgccacgtgttcaccttggatgttttggatgttcctgaacagtgttttccacttcatgtgggtggctgtattactcatgtgtcagatgtaccagatatcatgtttaggtattactacaaatgaaagaatgaatgccaggagatacaagcactttaaagtcacaacaacgtctattgaaagcccattcaaccatggatgtgtaagaaatattatagacttctttgaatttcgatgctgtggcctctttcgtcctgttatcgtggactggaccaggcagtatacaatagaatatgaccaaatatcaggatctgggtaccagctggtgtagcgacatcttatcctatgaagcatattgctgagtggtgcctgaaaattgtgtctgtccgtgtctttctcacactcgaatccacatcctttgaacaagagcatgctatgtgtagggctaatggtgaattttacagtctttttttcaacacttttattaacaaaagtaaacatggacagaacacactgccatttctgggaagagtaaagatgataaaaaataattttaatggttcttaatgtggaaattcacaacatactcaacttttgggttttgttctcacagtatttttcacaaaaaaagggtaaacttattctattgacagacatggtgtactgatcagaaatgttcagttttaactaaaactaaatttatgttatttggctaaatgttatgatgcagtctagtacgagtattgcatctaattccaggagcattgttttaagttgattgactagttattatgtacatttcagaatgtacacataaatactgtgatgaaaatcatgtgattgggatctactgtgatgttgtcttcaaaggcaggagaaaataatgttcacaataaaatgtgctaacaatgttttgtttctatcagctgttgcaatgctgatatatttctagttcagtgaaataatttgtagtaaccttactctgaggttttacggtctgataatgaagcacttgcatgagtatagtaagtcatgtttttttgttcaaatttaaaagccctgctaattgcatgacacaccacatagaatgtatactagcagatactatccagtgaagcataaattagaatttaatttgatgttcaaaaacagttccatttttaagggttaaggtggtattttcaagaaaaggcagaacaaataatgcaaaattctcagtaatagtgatacatggatatacttccttttaaattctcagctgcaaaataattgtagacaaaataatggcatttaactaaagatggagcatgatctaagtacatagcacatgtgaataaaagaaaagctgacagtatattctggtttcaataaaatgacctatcagaaagtagaatttcatccccaagagtatttcagtttatccaatattgagtaagttctgaaacagttttagaaaaaattttctttttgttaaatgtgatgcactgatcaatttttgtcacagcattttcataccttcatggtggactactagtcactgcttccataaatattgtttacagggtgagatttggtttattcatcttaagtgctgtagcaaactgtggttcgagcaacctgtgggaaatctgtgagagggaatggggtgggagatgtgggggaatggtggtcagactgatgacagatcctagaccaatgtaaagaatgtgtatctgtatataaataatttatcaaatagttttctctttgtgtctgtgttagtgtttttaaagctgctcatttcattttgtccaaccaaaaagaaaagggagataactaatgagcttctagtgatgttcaaaattgctgttaataggcattataccctgcaagttcactgcatgtctgatgcttggtaaaactagtcttccctgtaaaatgcagattacaggtattaaagcaatctagtggtatacccgccccttgccttagtaagaggagcagtgaaatgtatatagttgatgttcagtatttccaagtaccatttttatatagtagcttatttgaccataagtcacacatcaaaaaaagattacccttagtgtatgtgttttaatattagaaaattggcatatgtactttatttttgaaaagggaagagatgggtgtggggtggcaatagcattgtgccattttgtcatagaatgtaaaaattggttaactttacaaatgtcagctagttttgactactaattgggggaaattttagataatttttaaattcaaagttatttataaaatgctagaatttgttttaattttttgtattttgagccacttcacatgaagactcagttgcatttttatcgaatacatttttatcaacagttaaagactatggtggttttttcagagtttggctaagaatgttgttaccatcttctttgtttgtggtacaatattttcagtgcaaaagagatgtcattcagttaaaaagacaaacctctagatgtgtaattacatggaaaatactagcaatgtgaatgcttttgtagtaaccatcttgtagtacctgtgaaatctataactcagaaatggtcagatggtcaggagccagctatgcagcagtataccatctgtttaattattttgtaggtcctgtgtgtggaaccaactataaacccagttctaaagttgtgtatgatggtgaacctttgggaatagttcttatcaacttaattggatacttttagcaaataggaacttaattctcagcactgaacatgaattacttccttggagttttttttcattcatatttttgttgtttccaggaatttatttgatattaatgggcgtaaaacagcatcattgtacttaagctatggatgtttttattttatattttctttatttataactgtgccaagtattattttgctacttaccgtgttattctgtggaaagaaaaacctgtaaagtgtttaataaattagccctccttacataaattaaatgtcaaaattttgtaaaatattaatcagaataaatactgactctt

SEQ ID NO: 67 - protein, 498 aa, Homo sapiens
MARLEVIELPHSPQNLLVSPNSSHSHAVVLSWVRPFDGNSPILYYIVELSENNSPWKVHLSNVGPEMTGVTVSGLTPARTYQFRVCAVNEVGRGQYSAETSRLMLPEEPPSAPPKNIVASGRTNQSIMVQWQPPPETEHNGVLRGYILRYRLAGLPGEYQQRNITSPEVNYCLVTDLIIWTQYEIQVAAYNGAGLGVFSRAVTEYTLQGVPTAPPQNVQTEAVNSTTIQFLWNPPPQQFINGINQGYKLLAWPADAPEAVTVVTIAPDFHGVHHGHITNLKKFTAYFTSVLCFTTPGDGPPSTPQLVWTQEDKPGAVGHLSFTEILDTSLKVSWQEPLEKNGIITGYQISWEVYGRNDSRLTHTLNSTMHEYKIQGLSSLTTYTIDVAAVTAVGTGLVTSSTISSGVPPDLPGAPSNLVISNISPRSATLQFRPGYDGKTSISRWIVEGQMRPEGVGLPAEVTQPSHEAGLEPANLGSLWLLSLVYWCYSQKLWEFSC

SEQ ID NO: 68 - DNA, 1902 bp, Homo sapiens
  CDS (22)..(1515)
gaaggagggaatgactccaggatggcccggctggaagtgattgaactgcctcattcacctcagaacctcctggtcagccctaattcttcccacagccacgccgtggtgctctcttgggtccggccctttgatggaaacagtcctattctttattacatcgtggagctgtctgaaaacaactctccatggaaggtgcatctgtcaaacgttggccctgagatgacaggcgtcaccgtgagtggcctgactccggctcgtacctatcaattccgggtgtgcgcggtgaatgaagtgggcaggggccagtacagtgccgagacaagcaggttgatgctacctgaagaaccacccagtgctcccccgaaaaatatagtggccagtgggcggactaatcagtccattatggtccagtggcagccacccccagaaacagagcacaacggggtgttgcgtggatacatcctcaggtaccgcctggctggccttcccggagagtaccagcagcggaacatcaccagcccggaggtgaactactgcctggtgacagacctgatcatctggacacagtatgagatacaggtggcggcgtacaacggggccggtctgggcgtcttcagcagggcagtgaccgagtacaccttgcagggagtgcccaccgcgcccccgcagaacgtgcagacggaagccgtgaactccaccaccattcagttcctgtggaaccctccgcctcagcagtttatcaatggcatcaaccagggatacaagcttctggcatggccggcagatgcccccgaggctgtcactgtggtcactattgccccagatttccacggagtccaccatggacacataacgaacctgaagaagtttaccgcctacttcacttccgttctgtgcttcaccacccctggggacgggcctcccagcacacctcagctggtctggactcaggaagacaaaccaggagctgtgggacatctgagtttcacagagatcttggacacatctctcaaggtcagctggcaggagcccctggagaaaaatggcatcattactggctatcagatctcttgggaagtgtacggcaggaacgactctcgtctcacgcacaccctgaacagcacgatgcacgagtacaagatccaaggcctctcatctctcaccacctacaccatcgacgtggccgctgtgactgccgtgggcactggcctggtgacttcatccaccatttcttctggagtgcccccagaccttcctggtgccccatccaacctggtcatttccaacatcagccctcgctccgccacccttcagttccggccaggctatgacgggaaaacgtccatctccaggtggattgttgaggggcagatgagacctgaaggtgttggattacctgccgaggtcacacagccaagccatgaagccggattggagcctgcaaacctcggaagtctgtggctgctcagcctggtgtattggtgttacagccagaaactttgggaattctcttgttagttggttagttttactgtaattttctataaagaattcatatcatctgttaatggcgacagtttttgtttcttcctttgaattttttatattctttctttctcttttttgtttcttcttctttgagtattttgtaatcttactgggagggctaaagcgtcttctatcatatcgaattgggacaatgatagaagacaatctttgttttgtcactctaaagaaattattgtaagattttatcatcaggtatgacatttacaccattgatgtaggctttttaaaaaatatatccagcctgtattgggttaagatgattcttttctgatcctgatttcctaggagttggtttttttttttttaaagcataaataaatttaattgcatcag

SEQ ID NO: 69 - protein, 498 aa, Homo sapiens
MARLEVIELPHSPQNLLVSPNSSHSHAVVLSWVRPFDGNSPILYYIVELSENNSPWKVHLSNVGPEMTGVTVSGLTPARTYQFRVCAVNEVGRGQYSAETSRLMLPEEPPSAPPKNIVASGRTNQSIMVQWQPPPETEHNGVLRGYILRYRLAGLPGEYQQRNITSPEVNYCLVTDLIIWTQYEIQVAAYNGAGLGVFSRAVTEYTLQGVPTAPPQNVQTEAVNSTTIQFLWNPPPQQFINGINQGYKLLAWPADAPEAVTVVTIAPDFHGVHHGHITNLKKFTAYFTSVLCFTTPGDGPPSTPQLVWTQEDKPGAVGHLSFTEILDTSLKVSWQEPLEKNGIITGYQISWEVYGRNDSRLTHTLNSTTHEYKIQGLSSLTTYTIDVAAVTAVGTGLVTSSTISSGVPPDLPGAPSNLVISNISPRSATLQFRPGYDGKTSISRWIVEGQMRHQGVGLPAEVTQPSHEAGLEPANLGSLWLLSLVYWCYSQKLWEFSC

SEQ ID NO: 70 - DNA, 1902 bp, Homo sapiens
  CDS (22)..(1515)
gaaggagggaatgactccaggatggcccggctggaagtgattgaactgcctcattcacctcagaacctcctggtcagccctaattcttcccacagccacgccgtggtgctctcttgggtccggccctttgatggaaacagtcctattctttattacatcgtggagctgtctgaaaacaactctccatggaaggtgcatctgtcaaacgttggccctgagatgacaggcgtcaccgtgagtggcctgactccggctcgtacctatcaattccgggtgtgcgcggtgaatgaagtgggcaggggccagtacagtgccgagacaagcaggttgatgctacctgaagaaccacccagtgctcccccgaaaaatatagtggccagtgggcggactaatcagtccattatggtccagtggcagccacccccagaaacagagcacaacggggtgttgcgtggatacatcctcaggtaccgcctggctggccttcccggagagtaccagcagcggaacatcaccagcccggaggtgaactactgcctggtgacagacctgatcatctggacacagtatgagatacaggtggcggcgtacaacggggccggtctgggcgtcttcagcagggcagtgaccgagtacaccttgcagggagtgcccaccgcgcccccgcagaacgtgcagacggaagccgtgaactccaccaccattcagttcctgtggaaccctccgcctcagcagtttatcaatggcatcaaccagggatacaagcttctggcatggccggcagatgcccccgaggctgtcactgtggtcactattgccccagatttccacggagtccaccatggacacataacgaacctgaagaagtttaccgcctacttcacttccgttctgtgcttcaccacccctggggacgggcctcccagcacacctcagctggtctggactcaggaagacaaaccaggagctgtgggacatctgagtttcacagagatcttggacacatctctcaaggtcagctggcaggagcccctggagaaaaatggcatcattactggctatcagatctcttgggaagtgtacggcaggaacgactctcgtctcacgcacaccctgaacagcacgacgcacgagtacaagatccaaggcctctcatctctcaccacctacaccatcgacgtggccgctgtgactgccgtgggcactggcctggtgacttcatccaccatttcttctggagtgcccccagaccttcctggtgccccatccaacctggtcatttccaacatcagccctcgctccgccacccttcagttccggccaggctatgacgggaaaacgtccatctccaggtggattgttgaggggcagatgagacatcaaggtgttggattacctgccgaggtcacacagccaagccatgaagccggattggagcctgcaaacctcggaagtctgtggctgctcagcctggtgtattggtgttacagccagaaactttgggaattctcttgttagttggttagttttactgtaattttctataaagaattcatatcatctgttaatggcgacagtttttgtttcttcctttgaattttttatattctttctttctcttttttgtttcttcttctttgagtattttgtaatcttactgggagggctaaagcgtcttctatcatatcgaattgggacaatgatagaagacaatctttgttttgtcactctaaagaaattattgtaagattttatcatcaggtatgacatttacaccattgatgtaggctttttaaaaaatatatccagcctgtattgggttaagatgattcttttctgatcctgatttcctaggagttggtttttttttttttaaagcataaataaatttaattgcatcag

SEQ ID NO: 71 - protein, 245 aa, Homo sapiens
MPVQLSEHPEWNESMHSLRISVGGLPVLASMTKAADPRFRPRWKVILTFFVGAAILWLLCSHRPAPGRPPTHNAHNWRLGQAPANWYNDTYPLSPPQRTPAGIRYRIAVIADLDTESRAQEENTWFSYLKKGYLTLSDSGDKVAVEWDKDHGVLESHLAEKGRGMELSDLIVFNGKLYSVDDRTGVVYQIEGSKAVPWVILSDGDGTVEKGFKAEWLAVREIVRKRWRLVKQVSHVGVLGQWIQR

SEQ ID NO: 72 - DNA, 1551 bp, Homo sapiens
  CDS (127)..(861)
ggaagtcggccaccttcctccgtcccggccgttagcccagccaagcccagccaagcccagccaagccccgccgatcgcgggcaccggagccagccccgcagcgggtcccgcctgtctgtcacgctgatgcccgtgcagctgtctgagcacccggaatggaatgagtctatgcactccctccggatcagtgtggggggccttcctgtgctggcgtccatgaccaaggccgcggacccccgcttccgcccccgctggaaggtgatcctgacgttctttgtgggtgctgccatcctctggctgctctgctcccaccgcccggcccccggcaggccccccacccacaatgcacacaactggaggctcggccaggcgcccgccaactggtacaatgacacctaccccctgtctcccccacaaaggacaccggctgggattcggtatcgaatcgcagttatcgcagacctggacacagagtcaagggcccaagaggaaaacacctggttcagttacctgaaaaagggctacctgaccctgtcagacagtggggacaaggtggccgtggaatgggacaaagaccatggggtcctggagtcccacctggcggagaaggggagaggcatggagctatccgacctgattgttttcaatgggaaactctactccgtggatgaccggacgggggtcgtctaccagatcgaaggcagcaaagccgtgccctgggtgattctgtccgacggcgacggcaccgtggagaaaggcttcaaggccgaatggctggcagtgcgggagattgtaaggaagcggtggcggctggtgaagcaagtctcacatgtcggcgttcttggccaatggatacaaagataaagaaaatgttgcctttttctaggaactgtcagaaatcctcatgcctttcaagacttctgtgaatgacttgaattttttattccctgcctagggtctgtgaacgaggcctgtctcttccctggggtttctttccatggcctttatttctcctcttccagtgggagttttgcaggctcttctctgtggaaacttcacgagcgttggctgggcctcggcttcgctggagtgtactccagggtgaaggcagagtgggatttgagacccaggtagtggaggaagcgaaggaagtgaacgctgaatgtgacgcatttctgaagagctcagctgtcaccgggcatagcctggaagccccaagtctgttctgactttgcctggctgtctccttgacccgcctcctagatcattgtccttgatgtccaggctgggtcatttaaaatagagatgcaatcaggaaggttgggggacttgggactgtggctgaattgagaccttgctgatgtattcatgtcagcacctgagtcacagcccaggtgcccggaagcagcctcttcgcataggcagtgatttgcgattactttaaagctcaccttttttcttcccctctctgttcgctgctgtcagcataatgattgtgttccttccctatgggatccatctgttttgtaaacaataaagcgtctgagggag

SEQ ID NO: 73 - protein, 352 aa, Homo sapiens [sequence omitted]

SEQ ID NO: 74 - DNA, 2401 bp, Homo sapiens
  CDS (103)..(1158)
ttaggccgggggggtgcggtcctggtcggaaggaggtggagagtcgggggtcaccaggcctatccttggcgccacagtcggccaccggggctcgccgccgtcatggagagcggagggcggccctcgctgtgccagttcatcctcctgggcaccacctctgtggtcaccgccgccctgtactccgtgtaccggcagaaggcccgggtctcccaagagctcaagggagctaaaaaagttcatttgggtgaagatttaaagagtattctttcagaagctccaggaaaatgcgtgccttatgctgttatagaaggagctgtgcggtctgttaaagaaacgcttaacagccagtttgtggaaaactgcaagggggtaattcagcggctgacacttcaggagcacaagatggtgtggaatcgaaccacccacctttggaatgattgctcaaagatcattcatcagaggaccaacacagtgccctttgacctggtgccccacgaggatggcgtggatgtggctgtgcgagtgctgaagcccctggactcagtggatctgggtctagagactgtgtatgagaagttccacccctcgattcagtccttcaccgatgtcatcggccactacatcagcggtgagcggcccaaaggcatccaagagaccgaggagatgctgaaggtgggggccaccctcacaggggttggcgaactggtcctggacaacaactctgtccgcctgcagccgcccaaacaaggcatgcagtactatctaagcagccaggacttcgacagcctgctgcagaggcaggagtcgagcgtcaggctctggaaggtgctggcgctggtttttggctttgccacatgtgccaccctcttcttcattctccggaagcagtatctgcagcggcaggagcgcctgcgcctcaagcagatgcaggaggagttccaggagcatgaggcccagctgctgagccgagccaagcctgaggacagggagagtctgaagagcgcctgtgtagtgtgtctgagcagcttcaagtcctgcgtctttctggagtgtgggcacgtttgttcctgcaccgagtgctaccgcgccttgccagagcccaagaagtgccctatctgcagacaggcgatcacccgggtgatacccccgtacaacagctaatagtttggaagccgcacagcttgacctggaagcacccctgcccccttttcagggatttttatctcgaggcctttggaggagcagtggtgggggtagctgtcacctccaggtatgattgagggaggaatcgggtagaaactctccagacccatgcctccaatggcaggatgctgcctttcccacctgagaggggaccctgtccatgtgcagcctcatcagagcctcaccctgggaggatgccgtggcgtctcctcccaggagccagatcagtgcgagtgtgactgaaaatgcctcatcacttaagcaccaaagccagtgatcagcagctcttctgttcctgtgtcttctgtttttttctggtgaatcgttgcttgctgtggacttggtggaggactcagaggggaggaaaggctgggccccgagtacaacggatgccttgggtgctgcctccgaagagactctgccgcagcttttcttctttttcctcatgccccgggaaacagtctttcttcagaattgtcaggctgggcaggtcaacttgtgttcctttcccctcacctgcttgcctccttaacgcctgcacgtgtgtgtagaggacaaaagaaagtgaagtcagcacatccgcttctgcccagatggtcggggccccgggcaacagattgaagagagatcatgtgaagggcagttggtcaggcaggcctcctggtttcgccactggccctgatttgaactcctgccacttgggagagctcggggtggtccctggttttccctcctggagaatgaggcgcagaggcctcgcctcctgaaggacgcagtgtggatgccactggcctagtgtcctggcctcacagcttccttgcaaggctgtcacaaggaaaagcagccggctggcaccctgagcatatgccctcttggggctccctcatccagcccgtcgcagctttgacatcttggtgtactcatgtcgcttctccttgtgttaccccctcccagtattaccatttgcccctcacctgcccttggtgagccttttagtgcaagacagatggggctgttttcccccacctctgagtagttggaggtcacatacacagctctttttttattgcccttttctgcctctgaatgttcatctctcgtcctcctttgtgcaggcgaggaaggggtgccctcaggggccgacactagtgtgatgcagtgtccagtgtgaacagcagaaattaaacatgttgcaacc

SEQ ID NO: 75 - protein, 352 aa, Homo sapiens
MESGGRPSLCQFILLGTTSVVTAALYSVYRQKARVSQELKGAKKVHLGEDLKSILSEAPGKCVPYAVIEGAVRSVKETLNSQFVENCKGVIQRLTLQEHKMVWNRTTHLWNDCSKIIHQRTNTVPFDLVPHEDGVDVAVRVLKPLDSVDLGLETVYEKFHPSIQSFTDVIGHYISGERPKGIQETEEMLKVGATLTGVGELVLDNNSVRLQPPKQGMQYYLSSQDFDSLLQRQESSVRLWKVLALVFGFATCATLFFILRKQYLQRQERLRLKQMQEEFQEHEAQLLSRAKPEDRESLKSACVVCLSSFKSCVFLECGHVCSCTECYRALPEPKKCPICRQAITRVIPLYNS

SEQ ID NO: 76 - DNA, 2401 bp, Homo sapiens
  CDS (103)..(1158)
ttaggccgggggggtgcggtcctggtcggaaggaggtggagagtcgggggtcaccaggcctatccttggcgccacagtcggccaccggggctcgccgccgtcatggagagcggagggcggccctcgctgtgccagttcatcctcctgggcaccacctctgtggtcaccgccgccctgtactccgtgtaccggcagaaggcccgggtctcccaagagctcaagggagctaaaaaagttcatttgggtgaagatttaaagagtattctttcagaagctccaggaaaatgcgtgccttatgctgttatagaaggagctgtgcggtctgttaaagaaacgcttaacagccagtttgtggaaaactgcaagggggtaattcagcggctgacacttcaggagcacaagatggtgtggaatcgaaccacccacctttggaatgattgctcaaagatcattcatcagaggaccaacacagtgccctttgacctggtgccccacgaggatggcgtggatgtggctgtgcgagtgctgaagcccctggactcagtggatctgggtctagagactgtgtatgagaagttccacccctcgattcagtccttcaccgatgtcatcggccactacatcagcggtgagcggcccaaaggcatccaagagaccgaggagatgctgaaggtgggggccaccctcacaggggttggcgaactggtcctggacaacaactctgtccgcctgcagccgcccaaacaaggcatgcagtactatctaagcagccaggacttcgacagcctgctgcagaggcaggagtcgagcgtcaggctctggaaggtgctggcgctggtttttggctttgccacatgtgccaccctcttcttcattctccggaagcagtatctgcagcggcaggagcgcctgcgcctcaagcagatgcaggaggagttccaggagcatgaggcccagctgctgagccgagccaagcctgaggacagggagagtctgaagagcgcctgtgtagtgtgtctgagcagcttcaagtcctgcgtctttctggagtgtgggcacgtttgttcctgcaccgagtgctaccgcgccttgccagagcccaagaagtgccctatctgcagacaggcgatcacccgggtgatacccctgtacaacagctaatagtttggaagccgcacagcttgacctggaagcacccctgcccccttttcagggatttttatctcgaggcctttggaggagcagtggtgggggtagctgtcacctccaggtatgattgagggaggaatcgggtagaaactctccagacccatgcctccaatggcaggatgctgcctttcccacctgagaggggaccctgtccatgtgcagcctcatcagagcctcaccctgggaggatgccgtggcgtctcctcccaggagccagatcagtgcgagtgtgactgaaaatgcctcatcacttaagcaccaaagccagtgatcagcagctcttctgttcctgtgtcttctgtttttttctggtgaatcgttgcttgctgtggacttggtggaggactcagaggggaggaaaggctgggccccgagtacaacggatgccttgggtgctgcctccgaagagactctgccgcagcttttcttctttttcctcatgccccgggaaacagtctttcttcagaattgtcaggctgggcaggtcaacttgtgttcctttcccctcacctgcttgcctccttaacgcctgcacgtgtgtgtagaggacaaaagaaagtgaagtcagcacatccgcttctgcccagatggtcggggccccgggcaacagattgaagagagatcatgtgaagggcagttggtcaggcaggcctcctggtttcgccactggccctgatttgaactcctgccacttgggagagctcggggtggtccctggttttccctcctggagaatgaggcgcagaggcctcgcctcctgaaggacgcagtgtggatgccactggcctagtgtcctggcctcacagcttccttgcaaggctgtcacaaggaaaagcagccggctggcaccctgagcatatgccctcttggggctccctcatccagcccgtcgcagctttgacatcttggtgtactcatgtcgcttctccttgtgttaccccctcccagtattaccatttgcccctcacctgcccttggtgagccttttagtgcaagacagatggggctgttttcccccacctctgagtagttggaggtcacatacacagctctttttttattgcccttttctgcctctgaatgttcatctctcgtcctcctttgtgcaggcgaggaaggggtgccctcaggggccgacactagtgtgatgcagtgtccagtgtgaacagcagaaattaaacatgttgcaacc

SEQ ID NO: 77 - protein, 697 aa, Homo sapiens
MCKSLRYCFSHCLYLAMTRLEEVNREVNMHSSVRYLGYLARINLLVAICLGLYVRWEKTANSLILVIFILGLFVLGIASILYYYFSMEAASLSLSNLWFGFLLGLLCFLDNSSFKNDVKEESTKYLLLTSIVLRILCSLVERISGYVRHRPTLLTTVEFLELVGFAIASTTMLVEKSLSVILLVVALAMLIIDLRMKSFLAIPNLVIFAVLLFFSSLETPKNPIAFACFFICLITDPFLDIYFSGLSVTERWKPFLYRGRICRRLSVVFAGMIELTFFILSAFKLRDTHLWYFVIPGFSIFGIFWMICHIIFLLTLWGFHTKLNDCHKVYFTHRTDYNSLDRIMASKGMRHFCLISEQLVFFSLLATAILGAVSWQPTNGIFLSMFLIVLPLESMAHGLFHELGNCLGGTSVGYAIVIPTNFCSPDGQPTLLPPEHVQELNLRSTGMLNAIQRFFAYHMIETYGCDYSTSGLSFDTLHSKLKAFLELRTVDGPRHDTYILYYSGHTHGTGEWALAGGDTLRLDTLIEWWREKNGSFCSRLIIVLDSENSTPWVKEVRKINDQYIAVQGAELIKTVDIEEADPPQLGDFTKDWVEYNCNSSNNICWTEKGRTVKAVYGVSKRWSDYTLHLPTGSDVAKHWMLHFPRITYPLVHLANWLCGLNLFWICKTCFRCLKRLKMSWFLPTVLDTGQGFKLVKS

SEQ ID NO: 78 - DNA, 3008 bp, Homo sapiens
  CDS (372)..(2462)
cgtaccgtcgcggatttcggcggcggaaacatggcggtcgcggccgggccggtaacggagaaagtttacgccgacactggcctgtattagcgcgtatggcctcgggccctcgttccccaaggcgtgccgcctccctgttctcagtcgcaggctgaagccttgtctgctctcctcctttttggtttggttttggaactgactccgagggttgggagagcgcgttggtggcgacggccgagtcagatcactataaacaaaatttccacaagagaaaatgttgaaataggagttgcggatacattggatatactggatgaaatacaagcggttaatttttgtaacgtgagggaaaagcccacattgctggttacatgtgtaaatcactgcgttattgctttagtcattgtctctatttagcaatgacaagactggaagaagtaaatagagaagtgaacatgcattcttcagtgcggtatcttggctatttagccagaatcaatttattggttgctatatgcttaggtctatacgtaagatgggaaaaaacagcaaattccttaattttggtaatttttattcttggtctttttgttcttggaatcgccagcatactctattactatttttcaatggaagcagcaagtttaagtctctccaatctttggtttggattcttgcttggcctcctatgttttcttgataattcatcctttaaaaatgatgtaaaagaagaatcaaccaaatatttgcttctaacatccatagtgttaaggatattgtgctctctggtggagagaatttctggttatgtccgtcatcggcccactttactaaccacagttgaatttctggagcttgttggatttgccattgccagcacaactatgttggtggagaagtctctgagtgtcattttgcttgttgtagctctggctatgctgattattgatctgagaatgaaatctttcttagctattccaaacttagttatttttgcagttttgttatttttttcctcattggaaactcccaaaaatccgattgcttttgcgtgtttttttatttgcctgataactgatcctttccttgacatttattttagtggactttcagtaactgaaagatggaaaccctttttgtaccgtggaagaatttgcagaagactttcagtcgtttttgctggaatgattgagcttacattttttattctttccgcattcaaacttagagacactcacctctggtattttgtaatacctggcttttccatttttggaattttctggatgatttgtcatattatttttcttttaactctttggggattccataccaaattaaatgactgccataaagtatattttactcacaggacagattacaatagccttgatagaatcatggcatccaaagggatgcgccatttttgcttgatttcagagcagttggtgttctttagtcttcttgcaacagcgattttgggagcagtttcctggcagccaacaaatggaattttcttgagcatgtttctaatcgttttgccattggaatccatggctcatgggctcttccatgaattgggtaactgtttaggaggaacatctgttggatatgctattgtgattcccaccaacttctgcagtcctgatggtcagccaacactgcttcccccagaacatgtacaggagttaaatttgaggtctactggcatgctcaatgctatccaaagattttttgcatatcatatgattgagacctatggatgtgactattccacaagtggactgtcatttgatactctgcattccaaactaaaagctttcctcgaacttcggacagtggatggacccagacatgatacgtatattttgtattacagtgggcacacccatggtacaggagagtgggctctagcaggtggagatacactacgccttgacacacttatagaatggtggagagaaaagaatggttccttttgttcccggcttattatcgtattagacagcgaaaattcaaccccttgggtgaaagaagtgaggaaaattaatgaccagtatattgcagtgcaaggagcagagttgataaaaacagtagatattgaagaagctgacccgccacagctaggtgactttacaaaagactgggtagaatataactgcaactccagtaataacatctgctggactgaaaagggacgcacagtgaaagcagtatatggtgtgtcaaaacggtggagtgactacactctgcatttgccaacgggaagcgatgtggccaagcactggatgttacactttcctcgtattacatatcccctagtgcatttggcaaattggttatgcggtctgaaccttttttggatctgcaaaacttgttttaggtgcttgaaaagattaaaaatgagttggtttcttcctactgtgctggacacaggacaaggcttcaaacttgtcaaatcttaatttggaccccaaagcgggatattaataagcactcatactaccaattatcactaacttgccattttttgtatgctgtatttttatttgtggaaaataccttgctacttctgtagctgctctcactttgtcttttcttaagtaattatggtatatataaggcgttgggaaaaaacattttataatgaaagtatgtagggagtcaaatgcttactgtaaatgcataagagacgttaaaaataacactgcactttcaggaatgtttgcttatggtcctgattagaaagaaacagttgtctatgctctgcaatggtcaatgatgaattactaatgccttattttctaggcatataataatagtttagagaatgtagaccagataaatttgtttactgttttaagaaaactaccagtttacttacagaagattcttttttccaaacagtaggtttcatccaagaccatttgaagaactgcaaactctttctcttagaaaagaaagagggcagcctaaaataaacgcaaaatttgcttatactccatcac

SEQ ID NO: 79 - protein, 611 aa, Homo sapiens [sequence omitted]

SEQ ID NO: 80 - DNA, 3007 bp, Homo sapiens
  CDS (629)..(2461)
cgtaccgtcgcggatttcggcggcggaaacatggcggtcgcggccgggccggtaacggagaaagtttacgccgacactggcctgtattagcgcgtatggcctcgggccctcgttccccaaggcgtgccgcctccctgttctcagtcgcaggctgaagccttgtctgctctcctcctttttggtttggttttggaactgactccgagggttgggagagcgcgttggtggcgacggccgagtcagatcactataaacaaaatttccacaagagaaaatgttgaaataggagttgcggatacattggatatactggatgaaatacaagcggttaatttttgtaacgtgagggaaaagcccacattgctggttacatgtgtaaatcactgcgttattgctttagtcattgtctctatttagcaatgacaagactggaagaagtaaatagagaagtgaacatgcattcttcagtgcggtatcttgctatttagccagaatcaatttattggttgctatatgcttaggtctatacgtaagatgggaaaaaacagcaaattccttaattttggtaatttttattcttggtctttttgttcttggaatcgccagcatactctattactatttttcaatggaagcagcaagtttaagtctctccaatctttggtttggattcttgcttggcctcctatgttttcttgataattcatcctttaaaaatgatgtaaaagaagaatcaaccaaatatttgcttctaacatccatagtgttaaggatattgtgctctctggtggagagaatttctggttatgtccgtcatcggcccactttactaaccacagttgaatttctggagcttgttggatttgccattgccagcacaactatgttggtggagaagtctctgagtgtcattttgcttgttgtagctctggctatgctgattattgatctgagaatgaaatctttcttagctattccaaacttagttatttttgcagttttgttatttttttcctcattggaaactcccaaaaatccgattgcttttgcgtgtttttttatttgcctgataactgatcctttccttgacatttattttagtggactttcagtaactgaaagatggaaaccctttttgtaccgtggaagaatttgcagaagactttcagtcgtttttgctggaatgattgagcttacattttttattctttccgcattcaaacttagagacactcacctctggtattttgtaatacctggcttttccatttttggaattttctggatgatttgtcatattatttttcttttaactctttggggattccataccaaattaaatgactgccataaagtatattttactcacaggacagattacaatagccttgatagaatcatggcatccaaagggatgcgccatttttgcttgatttcagagcagttggtgttctttagtcttcttgcaacagcgattttgggagcagtttcctggcagccaacaaatggaattttcttgagcatgtttctaatcgttttgccattggaatccatggctcatgggctcttccatgaattgggtaactgtttaggaggaacatctgttggatatgctattgtgattcccaccaacttctgcagtcctgatggtcagccaacactgcttcccccagaacatgtacaggagttaaatttgaggtctactggcatgctcaatgctatccaaagattttttgcatatcatatgattgagacctatggatgtgactattccacaagtggactgtcatttgatactctgcattccaaactaaaagctttcctcgaacttcggacagtggatggacccagacatgatacgtatattttgtattacagtgggcacacccatggtacaggagagtgggctctagcaggtggagatacactacgccttgacacacttatagaatggtggagagaaaagaatggttccttttgttcccggcttattatcgtattagacagcgaaaattcaaccccttgggtgaaagaagtgaggaaaattaatgaccagtatattgcagtgcaaggagcagagttgataaaaacagtagatattgaagaagctgacccgccacagctaggtgactttacaaaagactgggtagaatataactgcaactccagtaataacatctgctggactgaaaagggacgcacagtgaaagcagtatatggtgtgtcaaaacggtggagtgactacactctgcatttgccaacgggaagcgatgtggccaagcactggatgttacactttcctcgtattacatatcccctagtgcatttggcaaattggttatgcggtctgaaccttttttggatctgcaaaacttgttttaggtgcttgaaaagattaaaaatgagttggtttcttcctactgtgctggacacaggacaaggcttcaaacttgtcaaatcttaatttggaccccaaagcgggatattaataagcactcatactaccaattatcactaacttgccattttttgtatgctgtatttttatttgtggaaaataccttgctacttctgtagctgctctcactttgtcttttcttaagtaattatggtatatataaggcgttgggaaaaaacattttataatgaaagtatgtagggagtcaaatgcttactgtaaatgcataagagacgttaaaaataacactgcactttcaggaatgtttgcttatggtcctgattagaaagaaacagttgtctatgctctgcaatggtcaatgatgaattactaatgccttattttctaggcatataataatagtttagagaatgtagaccagataaatttgtttactgttttaagaaaactaccagtttacttacagaagattcttttttccaaacagtaggtttcatccaagaccatttgaagaactgcaaactctttctcttagaaaagaaagagggcagcctaaaataaacgcaaaatttgcttatactccatcac

SEQ ID NO: 81 - protein, 184 aa, Homo sapiens
MTSFEDADTEETVTCLQMTVYHPGQLQCGIFQSISFNREKLPSSEVVKFGRNSNICHYTFQDKQVSRVQFSLQLFKKFNSSVLSFEIKNMSKKTNLIVDSRELGYLNKMDLPYRCMVRFGEYQFLMEKEDGESLEFFETQFILSPRSLLQENNWPPHRPIPEYGTYSLCSSQSSSPTEMDENES

SEQ ID NO: 82 - DNA, 1617 bp, Homo sapiens
  CDS (285)..(836)
tttttacaaaggccccgggcgcgagaggacgtgctctgccagccagtgggaaggcaggccgcgcgcgcgggagcgcgggaggatcggcggctcgcggtcactggtccctggctcggttccccgcaccccggggctcacacttacccgcgcggaggagcagcggccgggtgtccacccccatcctgcgcccagtctcctcgattcccctcgctctgagccgggagagccgaacagctgaagagagttcactgactccccagccccaggtgggccttgtgcacatcatgaccagttttgaagatgctgacacagaagagacagtaacttgtctccagatgacggtttaccatcctggccagttgcagtgtggaatatttcagtcaataagttttaacagagagaaactcccttccagcgaagtggtgaaatttggccgaaattccaacatctgtcattatacttttcaggacaaacaggtttcccgagttcagttttctctgcagctgtttaaaaaattcaacagctcagttctctcctttgaaataaaaaatatgagtaaaaagaccaatctgatcgtggacagcagagagctgggctacctaaataaaatggacctgccatacaggtgcatggtcagattcggagagtatcagtttctgatggagaaggaagatggcgagtcattggaattttttgagactcaatttattttatctccaagatcactcttgcaagaaaacaactggccaccacacaggcccataccggagtatggcacttattcgctctgctcctcccaaagcagttctccgacagaaatggatgaaaatgagtcatgaacacagaaagtctaagaggagaaatatgatggatgaagagctctgtagatgctgtatagacactaaataagagttgattagggtagtatattatagtcatctgttatgctgtgaaatttggaattcagtattatcattttgaagtctgtaaattgtgttagtcattaacttagtcacctgttgtattctggatctacacaaaattattttaactgctcttattaatctgtgaggattaatatacaaaaagtatcctttgagatgaagtcgtgttctcaaaataaggttatattattttctttttctgcttgattttcatcttgtgttttgctttgtttttgtaaggaaccatctcttggtttggtcacatcagttcacaacagccatttgttttcaaggtcaaggctccaggcaggttgttactggtgtttgcagcctgtcagtacttgcagtactggaataggttctaggctagtgtctgcgcgtcactgtggttttagcatgggaggacttatttgagaaatactaccttacttttctatgatttctttttacagagttatagtgtgtttactcctaagatgacagttctctttgtctatattcagcatctaagacaaatatttaaacattttaaagaaccactgtgttaagtttaggattatttacttaccaaattagaagtttgacttttatgtgttatacacaatcttaaaatttcacgaattcacctttttaatagtatccatgtacataataaaatcaaagtttaattagc

SEQ ID NO: 83 - protein, 392 aa, Homo sapiens
MDARWWAVVVLAAFPSLGAGGETPEAPPESWTQLWFFRFVVNAAGYASFMVPGYLLVQYFRRKNYLETGRGLCFPLVKACVFGNEPKASDEVPLAPRTEAAETTPMWQALKLLFCATGLQVSYLTWGVLQERVMTRSYGATATSPGERFTDSQFLVLMNRVLALIVAGLSCVLCKQPRHGAPMYRYSFASLSNVLSSWCQYEALKFVSFPTQVLAKASKVIPVMLMGKLVSRRSYEHWEYLTATLISIGVSMFLLSSGPEPRSSPATTLSGLFTVGSLLEQGALLEGTRFMGRHSEFAAHALLLSICSACGQLFIFYTIGQFGAAVFTIIMTLRQAFAILLSCLLYGHTVTVVGGLGVAVVFAALLLRVYARGRLKQRGKKAVPVESPVQKV

SEQ ID NO: 84 - DNA, 1898 bp, Homo sapiens
  CDS (119)..(1294)
acttccgctggccgctggctcgctggccgctcctggaggcggcggcgggagcgcagggggcgcgcggcccggggactcgcattccccggttccccctccaccccacgcggcctggaccatggacgccagatggtgggcagtggtggtgctggctgcgttcccctccctaggggcaggtggggagactcccgaagcccctccggagtcatggacccagctatggttcttccgatttgtggtgaatgctgctggctatgccagctttatggtacctggctacctcctggtgcagtacttcaggcggaagaactacctggagaccggtaggggcctctgctttcccctggtgaaagcttgtgtgtttggcaatgagcccaaggcctctgatgaggttcccctggcgccccgaacagaggcggcagagaccaccccgatgtggcaggccctgaagctgctcttctgtgccacagggctccaggtgtcttatctgacttggggtgtgctgcaggaaagagtgatgacccgcagctatggggccacagccacatcaccgggtgagcgctttacggactcgcagttcctggtgctaatgaaccgagtgctggcactgattgtggctggcctctcctgtgttctctgcaagcagccccggcatggggcacccatgtaccggtactcctttgccagcctgtccaatgtgcttagcagctggtgccaatacgaagctcttaagttcgtcagcttccccacccaggtgctggccaaggcctctaaggtgatccctgtcatgctgatgggaaagcttgtgtctcggcgcagctacgaacactgggagtacctgacagccaccctcatctccattggggtcagcatgtttctgctatccagcggaccagagccccgcagctccccagccaccacactctcaggcctcttcacagtgggctcactgctagaacagggggccctactggagggaacccgcttcatggggcgacacagtgagtttgctgcccatgccctgctactctccatctgctccgcatgtggccagctcttcatcttttacaccattgggcagtttggggctgccgtcttcaccatcatcatgaccctccgccaggcctttgccatccttctttcctgccttctctatggccacactgtcactgtggtgggagggctgggggtggctgtggtctttgctgccctcctgctcagagtctacgcgcggggccgtctaaagcaacggggaaagaaggctgtgcctgttgagtctcctgtgcagaaggtttgagggtggaaagggcctgaggggtgaagtgaaataggaccctcccaccatccccttctgctgtaacctctgagggagctggctgaaagggcaaaatgcaggtgttttctcagtatcacagaccagctctgcagcaggggattggggagcccaggaggcagccttcccttttgccttaagtcacccatcttccagtaagcagtttattctgagccccgggggtagacagtcctcagtgaggggttttggggagtttggggtcaagagagcataggtaggttccacagttactcttcccacaagttcccttaagtcttgccctagctgtgctctgccaccttccagactcactcccctctgcaaatacctgcatttcttaccctggtgagaaaagcacaagcggtgtaggctccaatgctgctttcccaggagggtgaagatggtgctgtgctgaggaaaggggatgcagagccctgcccagcaccaccacctcctatgctcctggatccctaggctctgttccatgagcctgttgcaggttttggtactttagaaatgtaactttttgctcttataattttattttattaaattaaattactgc

SEQ ID NO: 85 - protein, 432 aa, Homo sapiens
MDARWWAVVVLAAFPSLGAGGETPEAPPESWTQLWFFRFVVNAAGYASFMVPGYLLVQYFRRKNYLETGRGLCFPLVKACVFGNEPKASDEVPLAPRTEAAETTPMWQALKLLFCATGLQVSYLTWGVLQERVMTRSYGATATSPGERFTDSQFLVLMNRVLALIVAGLSCVLCKQPRHGAPMYRYSFASLSNVLSSWCQYEALKFVSFPTQVLAKASKVIPVMLMGKLVSRRSYEHWEYLTATLISIGVSMFLLSSGPEPRSSPATTLSGLILLAGYIAFDSFTSNWQDALFAYKMSSVQMMFGVNFFSCLFTVGSLLEQGALLEGTRFMGRHSEFAAHALLLSICSACGQLFIFYTIGQFGAAVFTIIMTLRQAFAILLSCLLYGHTVTVVGGLGVAVVFAALLLRVYARGRLKQRGKKAVPVESPVQKV

SEQ ID NO: 86 - DNA, 2018 bp, Homo sapiens
  CDS (119)..(1414)
acttccgctggccgctggctcgctggccgctcctggaggcggcggcgggagcgcagggggcgcgcggcccggggactcgcattccccggttccccctccaccccacgcggcctggaccatggacgccagatggtgggcagtggtggtgctggctgcgttcccctccctaggggcaggtggggagactcccgaagcccctccggagtcatggacccagctatggttcttccgatttgtggtgaatgctgctggctatgccagctttatggtacctggctacctcctggtgcagtacttcaggcggaagaactacctggagaccggtaggggcctctgctttcccctggtgaaagcttgtgtgtttggcaatgagcccaaggcctctgatgaggttcccctggcgccccgaacagaggcggcagagaccaccccgatgtggcaggccctgaagctgctcttctgtgccacagggctccaggtgtcttatctgacttggggtgtgctgcaggaaagagtgatgacccgcagctatggggccacagccacatcaccgggtgagcgctttacggactcgcagttcctggtgctaatgaaccgagtgctggcactgattgtggctggcctctcctgtgttctctgcaagcagccccggcatggggcacccatgtaccggtactcctttgccagcctgtccaatgtgcttagcagctggtgccaatacgaagctcttaagttcgtcagcttccccacccaggtgctggccaaggcctctaaggtgatccctgtcatgctgatgggaaagcttgtgtctcggcgcagctacgaacactgggagtacctgacagccaccctcatctccattggggtcagcatgtttctgctatccagcggaccagagccccgcagctccccagccaccacactctcaggcctcatcttactggcaggttatattgcttttgacagcttcacctcaaactggcaggatgccctgtttgcctataagatgtcatcggtgcagatgatgtttggggtcaatttcttctcctgcctcttcacagtgggctcactgctagaacagggggccctactggagggaacccgcttcatggggcgacacagtgagtttgctgcccatgccctgctactctccatctgctccgcatgtggccagctcttcatcttttacaccattgggcagtttggggctgccgtcttcaccatcatcatgaccctccgccaggcctttgccatccttctttcctgccttctctatggccacactgtcactgtggtgggagggctgggggtggctgtggtctttgctgccctcctgctcagagtctacgcgcggggccgtctaaagcaacggggaaagaaggctgtgcctgttgagtctcctgtgcagaaggtttgagggtggaaagggcctgaggggtgaagtgaaataggaccctcccaccatccccttctgctgtaacctctgagggagctggctgaaagggcaaaatgcaggtgttttctcagtatcacagaccagctctgcagcaggggattggggagcccaggaggcagccttcccttttgccttaagtcacccatcttccagtaagcagtttattctgagccccgggggtagacagtcctcagtgaggggttttggggagtttggggtcaagagagcataggtaggttccacagttactcttcccacaagttcccttaagtcttgccctagctgtgctctgccaccttccagactcactcccctctgcaaatacctgcatttcttaccctggtgagaaaagcacaagcggtgtaggctccaatgctgctttcccaggagggtgaagatggtgctgtgctgaggaaaggggatgcagagccctgcccagcaccaccacctcctatgctcctggatccctaggctctgttccatgagcctgttgcaggttttggtactttagaaatgtaactttttgctcttataattttattttattaaattaaattactgc

SEQ ID NO: 87 - protein, 235 aa, Homo sapiens
MGIGKSKINSCPLSLSWGKRHSVDTSPGYHESDSKKSEDLSLCNVAEHSNTTEGPTGKQEGAQSVEEMFEEEAEEEVFLKFVILHAEDDTDEALRVQNLLQDDFGIKPGIIFAEMPCGRQHLQNLDDAVNGSAWTILLLTENFLRDTWCNFQFYTSLMNSVNRQHKYNSVIPMRPLNNPLPRERTPFALQTINALEEESRGFPTQVERIFQESVYKTQQTIWKETRNMVQRQFIA

SEQ ID NO: 88 - DNA, 2717 bp, Homo sapiens
  CDS (111)..(815)
aaaaggaagacagaaaagccgcgggctgactgtggtggcgctcgcctgcagattgaaaagaaatgctgagaaatacataaagttttcctcttctgccttggatatttataatgggtatcgggaagtctaaaataaattcctgccctctttctctctcttggggtaaaaggcacagtgtggatacaagtccaggatatcatgagtcagattccaagaagtctgaagatctatccttgtgtaatgttgctgagcacagcaatacaacagaggggccaacaggaaagcaggagggagctcagagcgtggaagagatgtttgaagaagaagctgaagaagaggtgttcctcaaatttgtgatattgcatgcagaagatgacacagatgaagccctcagagtccagaatctgctacaagatgactttggtatcaaacccggaataatctttgctgagatgccatgtggcagacagcatttacagaatttagatgatgctgtaaatgggtctgcatggacaatcttattactgactgaaaactttttaagagatacttggtgtaatttccagttctatacgtccctaatgaactccgttaacaggcagcataaatacaactctgttatacccatgcggcccctgaacaatccccttccccgagaaaggactccctttgccctccaaaccatcaatgccttagaggaagaaagtcgtggatttcctacacaagtagaaagaatttttcaggagtctgtgtataagacacaacaaactatatggaaagagacaagaaatatggtacaaagacaatttattgcctgagatgaaacatataacatgtggctggctcttgttttgtaaaccaaatgattaatcttcacttgagaaagcagtttctaggaaatgtttaaataaaagagagtcttcaccttaaagaaacctatggagcacaagaaagataaatttctgcaggacagcctataaaattgtggtactttttgatgtttcagtaaacttgacattgtcagagtttcaaggacttttctttcacaattttcctagttcatggatatgaaaaaggaattctcaatccatattccttgtattgaaccttgaacaaaaacttgtatgacagacatttttaaaaatgtgacaacacttttattctctgaattttgatctcaaaggacacagaaaaaaaatggccccaggagatctgatcacacttcctcctgaggcacctctcatggatgttgcaataagcattcgggtactatcacccagaaatatgaattgccagaatagaacatttagcatgttaagcgttgatgcatataaaatcagaaatagatgtgagaatggtggaactttttaaaagaacccagtcaaatgtattttctgctgaaatctgcatatttggaggcatttcccaccaccgattcacagcccatttgatagtgtggtagttagggacttcgtggagtggtgttcagacgtcccctggggcttaaatctcttcatattagtcatcatttgtaactatggctttatttgcagagcttctaaaaggcgtataactgtgtgagtggccagatattcactttttagatcaaaaacctctcttatggaagctttaaaagtttccgtcacacacaattctcttctcaggaagtatttctcatttaggtcttcaaagtagcctgactgtgtgcatgtgtgtgtgtgataggttatttataaagactttggatagaaggagatgtattttattacctcctattctagagccccatgctcctaacaagccagagaggccccaaacaggattgtttctttcctccacagcccttctgcccatctgagattgagggagcatcgtccacttgagatcagggatggggtggagaatgggtcatgtcatgtaatgagaaaagccctcttcgggatcatgagacttggttctagtccaatttctgccactgaggatgaatgtaactgtgggcaaactatttaccctcctttatctgtgaaatgaaagggttgaattgatggatctctaaaggcttttgtcctctatgaggatgtgaaaaactagggaccacaaaagggaacaagcaaaaaagtttggattcgataaagtgatatgtaatagttgcagaaggctttatatatgcttataatgaaaagatattttttgtatattgacagcataatttatttttaatgctgtcattacacttaaagtcacaggaaaaaaatatacatgcttactcaggctttcttaaaaataaatttttatagagatccttgagtaaagacattttgcttaatttcttttttcttattccccacttgtatatcccctaccagtaccgggatctgcacacatctttttgcagttacctcttcatagccatgaaccaaaacgttctatgaggagcatgcaagtaagtcaagcctcctattctgttagtacttattagaggaggagatggttttcattgcatagtgacattttcttagccttaacgttctgatagtagcttactactcacttctctttttcagttttcataataagtattcatttttttgccataatgcttcctgtaaagccaattttatatactaataaaacatgaactgcccactcttcatgcctgccaaacttggggcaattgatgctaaatggtatttttaaaataaatgtttttattcttt

SEQ ID NO: 89 - protein, 245 aa, Homo sapiens
MASPSRRLQTKPVITCFKSVLLIYTFIFWITGVILLAVGIWGKVSLENYFSLLNEKATNVPFVLIATGTVIILLGTFGCFATCRASAWMLKLYAMFLTLVFLVELVAAIVGFVFRHEIKNSFKNNYEKALKQYNSTGDYRSHAVDKIQNTLHCCGVTDYRDWTDTNYYSEKGFPKSCCKLEDCTPQRDADKVNNEGCFIKVMTIIESEMGVVAGISFGVACFQLIGIFLAYCLSRAITNNQYEIV

SEQ ID NO: 90 - DNA, 1793 bp, Homo sapiens
  CDS (60)..(794)
gcgtctcgctctctgtgttccaatcgcccggtgcggtggtgcagggtctcgggctagtcatggcgtccccgtctcggagactgcagactaaaccagtcattacttgtttcaagagcgttctgctaatctacacttttattttctggatcactggcgttatccttcttgcagttggcatttggggcaaggtgagcctggagaattacttttctcttttaaatgagaaggccaccaatgtccccttcgtgctcattgctactggtaccgtcattattcttttgggcacctttggttgttttgctacctgccgagcttctgcatggatgctaaaactgtatgcaatgtttctgactctcgtttttttggtcgaactggtcgctgccatcgtaggatttgttttcagacatgagattaagaacagctttaagaataattatgagaaggctttgaagcagtataactctacaggagattatagaagccatgcagtagacaagatccaaaatacgttgcattgttgtggtgtcaccgattatagagattggacagatactaattattactcagaaaaaggatttcctaagagttgctgtaaacttgaagattgtactccacagagagatgcagacaaagtaaacaatgaaggttgttttataaaggtgatgaccattatagagtcagaaatgggagtcgttgcaggaatttcctttggagttgcttgcttccaactgattggaatctttctcgcctactgcctctctcgtgccataacaaataaccagtatgagatagtgtaacccaatgtatctgtgggcctattcctctctacctttaaggacatttagggtcccccctgtgaattagaaagttgcttggctggagaactgacaacactacttactgatagaccaaaaaactacaccagtaggttgattcaatcaagatgtatgtagacctaaaactacaccaataggctgattcaatcaagatccgtgctcgcagtgggctgattcaatcaagatgtatgtttgctatgttctaagtccaccttctatcccattcatgttagatcgttgaaaccctgtatccctctgaaacactggaagagctagtaaattgtaaatgaagtaatactgtgttcctcttgactgttatttttcttagtagggggcctttggaaggcactgtgaatttgctattttgatgtagtgttacaagatggaaaattgattcctctgactttgctattgatgtagtgtgatagaaaattcacccctctgaactggctccttcccagtcaaggttatctggtttgattgtataatttgcaccaagaagttaaaatgttttatgactctctgttctgctgacaggcagagagtcacattgtgtaatttaatttcagtcagtcaatagatggcatccctcatcagggttgccagatggtgataacagtgtaaggccttgggtctaaggcatccacgactggaagggactactgatgttctgtgatacatcaggtttcagcacacaacttacatttctttgcctccaaattgaggcatttattatgatgttcatactttccctcttgtttgaaagtttctaattattaaatggtgtcggaattgttgtattttccttaggaattcagtggaacttatcttcattaaatttagctggtaccaggttgatatgacttgtcaatattatggtcaactttaagtcttagttttcgtttgtgcctttgattaataagtataactcttatacaataaatactgctttcctct

SEQ ID NO: 91 - protein, 180 aa, Homo sapiens
MASTSYDYCRVPMEDGDKRCKLLLGIGILVLLIIVILGVPLIIFTIKANSEACRDGLRAVMECRNVTHLLQQELTEAQKGFQDVEAQAATCNHTVMALMASLDAEKAQGQKKVEELEGEITTLNHKLQDASAEVERLRRENQVLSVRIADKKYYPSSQDSSSAAAPQLLIVLLGLSALLQ

SEQ ID NO: 92 - DNA, 970 bp, Homo sapiens
  CDS (26)..(565)
tttttcagctaaaggggagatctggatggcatctacttcgtatgactattgcagagtgcccatggaagacggggataagcgctgtaagcttctgctggggataggaattctggtgctcctgatcatcgtgattctgggggtgcccttgattatcttcaccatcaaggccaacagcgaggcctgccgggacggccttcgggcagtgatggagtgtcgcaatgtcacccatctcctgcaacaagagctgaccgaggcccagaagggctttcaggatgtggaggcccaggctgccacctgcaaccacactgtgatggccctaatggcttccctggatgcagagaaggcccaaggacaaaagaaagtggaggagcttgagggagagatcactacattaaaccataagcttcaggacgcgtctgcagaggtggagcgactgagaagagaaaaccaggtcttaagcgtgagaatcgcggacaagaagtactaccccagctcccaggactccagctccgctgcggcgccccagctgctgattgtgctgctgggcctcagcgctctgctgcagtgagatcccaggaagctggcacatcttggaaggtccgtcctgctcggcttttcgcttgaacattcccttgatctcatcagttctgagcgggtcatggggcaacacggttagcggggagagcacggggtagccggagaagggcctctggagcaggtctggaggggccatggggcagtcctgggtgtggggacacagtcgggttgacccagggctgtctccctccagagcctccctccggacaatgagtcccccctcttgtctcccaccctgagattgggcatggggtgcggtgtggggggcatgtgctgcctgttgttatgggttttttttgcggggggggttgcttttttctggggtctttgagctccaaaaaataaacacttcctttgagggagagcacacctt

SEQ ID NO: 93 - protein, 331 aa, Homo sapiens
MDSEKKRFTEEATKYFRERVSPVHLQILLTNNEAWKRFVTAAELPRDEADALYEALKKLRTYAAIEDEYVQQKDEQFREWFLKEFPQVKRKIQESIEKLRALANGIEEVHRGCTISNVVSSSTGAASGIMSLAGLVLAPFTAGTSLALTAAGVGLGAASAVTGITTSIVEHSYTSSAEAEASRLTATSIDRLKVFKEVMRDITPNLLSLLNNYYEATQTIGSEIRAIRQARARARLPVTTWRISAGSGGQAERTIAGTTRAVSRGARILSATTSGIFLALDVVNLVYESKHLHEGAKSASAEELRRQAQELEENLMELTQIYQRLNPCHTH

SEQ ID NO: 94 - DNA, 2039 bp, Homo sapiens
  CDS (175)..(1167)
attatgcagatgcacggctggaggtgggatccacacagctcagaacagctggatcttgctcacactctttcaagagaagcttccttgggttaagaaaaaaaacgaacccttccagtcaggtcagtgactggagagctccaaggaaagtctctcagtgacctggctgctggcaccatggactcagaaaagaaacgctttactgaagaggccaccaaatacttccgggagagagtcagcccagtgcatctgcaaatcctgctgactaacaatgaagcctggaagagattcgtgactgcggctgaattgcccagggatgaggcagatgctctctacgaagctctgaagaagcttagaacatatgcagctattgaggacgaatatgtgcagcagaaagatgagcagtttagggaatggtttttgaaagagtttccccaagtcaagaggaagatccaggagtccatagaaaagcttcgtgcccttgcaaatggtattgaagaggtccacagaggctgcaccatctccaacgtggtgtccagctccactggcgctgcctctggcatcatgtcccttgctggtcttgttttggcaccatttacagcagggacgagtctggcccttactgcagctggggtagggctgggagcagcgtctgctgtgactgggatcaccaccagcatcgtggagcactcatacacatcatcagcagaagctgaagccagcaggctgactgcaaccagcattgaccgattgaaggtatttaaggaagttatgcgtgacatcacacccaacttactttcccttcttaataattattacgaagccacacaaaccattgggagtgaaatccgtgccatcaggcaagccagagccagggcccgactccctgtgaccacctggcgaatctcagctggaagtggtggtcaagcagagagaacgattgcaggcaccacccgggcagtgagcagaggagcccggatcctgagtgcgaccacttcaggcatcttccttgcactggatgtggtcaaccttgtatacgagtcaaagcacttgcatgagggggcaaagtctgcatctgctgaggagctgaggcggcaggctcaggagctggaggagaatctaatggagctcactcagatctatcagcgtctgaatccatgccatacccactgaccccagaccagtgcagccagcaggggaggtgagccatacacaggccacgacaaaatgcaggcattttattagggggataaagagggcaaggtaaagtttatggagctgagtgttagtgactttggcatttctgtagctgagcacagcaggggaggggttaatgcagatggcaagtgcaccaaggagaaggcaggaatgctggagcctggaataagggaggagaggggactggagagtgtggggaataggaagaagaaatttcctttagactaacgaatatattggggggaggaatagaggggaggtgtgcaggaaccagcaatgagaaggccaggaaaagaaagagctgaaaatgcagaaagccgaagagttagaacttttggatacagcagaagaaacagcggctccactaccgacctgcccccggttcgatgtccttccaagaatgaagtctttccctggtgatggtcccctgccctgtctttccagcatccactctgtcttgtcctcctggaagtgtatctcagtcagccagtggcttcttgatgatggcggtggaggtggtggttgtagtgtgatggatcccctttaggttatttaggggtatatgtcccctgcttgaaccctgaaggccaggtaatgagccatggccattgtccccagctgaggaccaggtgtctctaaaaacccaaacatcctggagagtatgcgagaacctaccaagaaaaacagtctcattactcatatacagcaggcaaagagacagaaaattaactgaaaagcagtttagagactgggggaggccggatctctagagccatcctgctgagtgccctgtgtgtaagtcctaataaactcacctactcacc

SEQ ID NO: 95 - protein, 407 aa, Homo sapiens
MELLEEDLTCPICCSLFDDPRVLPCSHNFCKKCLEGILEGSVRNSLWRPAPFKCPTCRKETSATGINSLQVNYSLKGIVEKYNKIKISPKMPVCKGHLGQPLNIFCLTDMQLICGICATRGEHTKHVFCSIEDAYAQERDAFESLFQSFETWRRGDALSRLDTLETSKRKSLQLLTKDSDKVKEFFEKLQHTLDQKKNEILSDFETMKLAVMQAYDPEINKLNTILQEQRMAFNIAEAFKDVSEPIVFLQQMQEFREKIKVIKETPLPPSNLPASPLMKNFDTSQWEDIKLVDVDKLSLPQDTGTFISKIPWSFYKLFLLILLLGLVIVFGPTMFLEWSLFDDLATWKGCLSNFSSYLTKTADFIEQSVFYWEQVTDGFFIFNERFKNFTLVVLNNVAEFVCKYKLL

SEQ ID NO: 96 - DNA, 1409 bp, Homo sapiens
  CDS (181)..(1401)
gctgtgcttggcgcgtaccgtgcggtccctgtagttggaggacgggcggtcgcgcggcctttcccactagccggagtagcctctagttcgttagtcaaaacgtgaaaaaaaaagacctgctttgccctgggaaatagtaaccctgccaaatacatcagcttgtaggagacagaggatgtgatggagctgcttgaagaagatctcacatgccctatttgttgtagtctgtttgatgatccacgggttttgccttgctcccacaacttctgcaaaaaatgcttagaaggtatcttagaagggagtgtgcggaattccttgtggagaccagctccattcaagtgtcctacatgccgtaaggaaacttcagctactggaattaatagcctgcaggttaattactccctgaagggtattgtggaaaagtataacaagatcaagatctctcccaaaatgccagtatgcaaaggacacttggggcagcctctcaacattttctgcctgactgatatgcagctgatttgtgggatctgtgctactcgtggggagcacaccaaacatgtcttctgttctattgaagatgcctatgctcaggaaagggatgcctttgagtccctcttccagagctttgagacctggcgtcggggagatgctctttctcgcttggataccttggaaactagtaagaggaaatccctacagttactgactaaagattcagataaagtgaaggaattttttgagaagttacaacacacactggatcaaaagaagaatgaaattctgtctgactttgagaccatgaaacttgctgttatgcaagcatatgacccagagatcaacaaactcaacaccatcttgcaggagcaacggatggcctttaacattgctgaggctttcaaagatgtgtcagaacccattgtatttctgcaacagatgcaggagtttagagagaaaatcaaagtaatcaaggaaactcctttacctccctctaatttgcctgcaagccctttaatgaagaactttgataccagtcagtgggaagacataaaactagtcgatgtggataaactttctttgcctcaagacactggcacattcattagcaagattccctggagcttttataagttatttttgctaatccttctgcttggccttgtcattgtctttggtcctaccatgttcctagaatggtcattatttgatgacctggcaacttggaaaggctgtctttcaaacttcagttcctatctgactaaaacagccgatttcatagaacaatcagttttttactgggaacaggtgacagatgggtttttcattttcaatgaaagattcaagaattttactttggtggtactgaacaatgtggcagaatttgtgtgcaaatataaactattataaaatcg

SEQ ID NO: 97 - protein, 465 aa, Homo sapiens
MASTTSTKKMMEEATCSICLSLMTNPVSINCGHSYCHLCITDFFKNPSQKQLRQETFCCPQCRAPFHMDSLRPNKQLGSLIEALKETDQEMSCEEHGEQFHLFCEDEGQLICWRCERAPQHKGHTTALVEDVCQGYKEKLQEAVTKLKQLEDRCTEQKLSTAMRITKWKEKVQIQRQKIRSDFKNLQCFLHEEEKSYLWRLEKEEQQTLSRLRDYEAGLGLKSNELKSHILELEEKCQGSAQKLLQNVNDTLSRSWAVKLETSEAVSLELHTMCNVSKLYFDVKKMLRSHQVSVTLDPDTAHHELILSEDRRQVTRGYTQENQDTSSRRFTAFPCVLGCEGFTSGRRYFEVDVGEGTGWDLGVCMENVQRGTGMKQEPQSGFWTLRLCKKKGYVALTSPPTSLHLHEQPLLVGIFLDYEAGVVSFYNGNTGCHIFTFPKASFSDTLRPYFQVYQYSPLFLPPPGD

SEQ ID NO: 98 - DNA, 1940 bp, Homo sapiens
  CDS (477)..(1871)
gttaacttcctgacccaggaagtggcagcaacagaggggactagcagcgaatatactttacaccaaatctcagaagattcagaacttagatgagtggggcccaggacaggaaccctggagccttggaaggaggggagccccatctccccagaagagcagtgaccccagcagagaggggcctggtgtatcactggaggaaatagcctgccaaggaatacacgtcttcagaagaagttctgtgtggcttcaagagactgatcaaattgtgagaggaaaacagcctacccggtcctcttttcttcaatacaaaatgagataataggggttggaaggaaaaccttcaagacctatggaagtcagttgcagccagctcatcacatagaggtgcaggtgaggtgtattttcatcacggtggaaaattctggctgcttcatctccatctctagagccaatattggagcttttcaataaaagctatggcctcaaccaccagcaccaagaagatgatggaggaagccacctgctccatctgcctgagcctgatgacgaacccagtaagcatcaactgtggacacagctactgccacttgtgtataacagacttctttaaaaacccaagccaaaagcaactgaggcaggagacattctgctgtccccagtgtcgggctccatttcatatggatagcctccgacccaacaagcagctgggaagcctcattgaagccctcaaagagacggatcaagaaatgtcatgtgaggaacacggagagcagttccacctgttctgcgaagacgaggggcagctcatctgctggcgctgtgagcgggcaccacagcacaaagggcacaccacagctcttgttgaagacgtatgccagggctacaaggaaaagctccaggaagctgtgacaaaactgaagcaacttgaagacagatgtacggagcagaagctgtccacagcaatgcgaataactaaatggaaagagaaggtacagattcagagacaaaaaatccggtctgactttaagaatctccagtgtttcctacatgaggaagagaagtcttatctctggaggctggagaaagaagaacaacagactctgagtagactgagggactatgaggctggtctggggctgaagagcaatgaactcaagagccacatcctggaactggaggaaaaatgtcagggctcagcccagaaattgctgcagaatgtgaatgacactttgagcaggagttgggctgtgaagctggaaacatcagaggctgtctccttggaacttcatactatgtgcaatgtttccaagctttacttcgatgtgaagaaaatgttaaggagtcatcaagttagtgtgactctggatccagatacagctcatcacgaactaattctctctgaggatcggagacaagtgactcgtggatacacccaggagaatcaggacacatcttccaggagatttactgccttcccctgtgtcttgggttgtgaaggcttcacctcaggaagacgttactttgaagtggatgttggcgaaggaaccggatgggatttaggagtttgtatggaaaatgtgcagaggggcactggcatgaagcaagagcctcagtctggattctggaccctcaggctgtgcaaaaagaaaggctatgtagcacttacttctcccccaacttcccttcatctgcatgagcagcccctgcttgtgggaatttttctggactatgaggccggagttgtatccttttataacgggaatactggctgccacatctttactttcccgaaggcttccttctctgatactctccggccctatttccaggtttatcaatattctcctttgtttctgcctcccccaggtgactaaggaaaagagcagaagctccttggtttaaccagcacagagaaaataatataaatcccataagggcag

SEQ ID NO: 99 - protein, 465 aa, Homo sapiens
MASTTSTKKMMEEATCSICLSLMTNPVSINCGHSYCHLCITDFFKNPSQKQLRQETFCCPQCRAPFHMDSLRPNKQLGSLIEALKETDQEMSCEEHGEQFHLFCEDEGQLICWRCERAPQHKGHTTALVEDVCQGYKEKLQKAVTKLKQLEDRCTEQKLSTAMRITKWKEKVQIQRQKIRSDFKNLQCFLHEEEKSYLWRLEKEEQQTLSRLRDYEAGLGLKSNELKSHILELEEKCQGSAQKLLQNVNDTLSRSWAVKLETSEAVSLELHTMCNVSKLYFDVKKMLRSHQVSVTLDPDTAHHELILSEDRRQVTRGYTQENQDTSSRRFTAFPCVLGCEGFTSGRRYFEVDVGEGTGWDLGVCMENVQRGTGMKQEPQSGFWTLRLCKKKGYVALTSPPTSLHLHEQPLLVGIFLDYEAGVVSFYNGNTGCHIFTFPKASFSDTLRPYFQVYQYSPLFLPPPGD

SEQ ID NO: 100 - DNA, 1940 bp, Homo sapiens
  CDS (477)..(1871)
gttaacttcctgacccaggaagtggcagcaacagaggggactagcagcgaatatactttacaccaaatctcagaagattcagaacttagatgagtggggcccaggacaggaaccctggagccttggaaggaggggagccccatctccccagaagagcagtgaccccagcagagaggggcctggtgtatcactggaggaaatagcctgccaaggaatacacgtcttcagaagaagttctgtgtggcttcaagagactgatcaaattgtgagaggaaaacagcctacccggtcctcttttcttcaatacaaaatgagataataggggttggaaggaaaaccttcaagacctatggaagtcagttgcagccagctcatcacatagaggtgcaggtgaggtgtattttcatcacggtggaaaattctggctgcttcatctccatctctagagccaatattggagcttttcaataaaagctatggcctcaaccaccagcaccaagaagatgatggaggaagccacctgctccatctgcctgagcctgatgacgaacccagtaagcatcaactgtggacacagctactgccacttgtgtataacagacttctttaaaaacccaagccaaaagcaactgaggcaggagacattctgctgtccccagtgtcgggctccatttcatatggatagcctccgacccaacaagcagctgggaagcctcattgaagccctcaaagagacggatcaagaaatgtcatgtgaggaacacggagagcagttccacctgttctgcgaagacgaggggcagctcatctgctggcgctgtgagcgggcaccacagcacaaagggcacaccacagctcttgttgaagacgtatgccagggctacaaggaaaagctccagaaagctgtgacaaaactgaagcaacttgaagacagatgtacggagcagaagctgtccacagcaatgcgaataactaaatggaaagagaaggtacagattcagagacaaaaaatccggtctgactttaagaatctccagtgtttcctacatgaggaagagaagtcttatctctggaggctggagaaagaagaacaacagactctgagtagactgagggactatgaggctggtctggggctgaagagcaatgaactcaagagccacatcctggaactggaggaaaaatgtcagggctcagcccagaaattgctgcagaatgtgaatgacactttgagcaggagttgggctgtgaagctggaaacatcagaggctgtctccttggaacttcatactatgtgcaatgtttccaagctttacttcgatgtgaagaaaatgttaaggagtcatcaagttagtgtgactctggatccagatacagctcatcacgaactaattctctctgaggatcggagacaagtgactcgtggatacacccaggagaatcaggacacatcttccaggagatttactgccttcccctgtgtcttgggttgtgaaggcttcacctcaggaagacgttactttgaagtggatgttggcgaaggaaccggatgggatttaggagtttgtatggaaaatgtgcagaggggcactggcatgaagcaagagcctcagtctggattctggaccctcaggctgtgcaaaaagaaaggctatgtagcacttacttctcccccaacttcccttcatctgcatgagcagcccctgcttgtgggaatttttctggactatgaggccggagttgtatccttttataacgggaatactggctgccacatctttactttcccgaaggcttccttctctgatactctccggccctatttccaggtttatcaatattctcctttgtttctgcctcccccaggtgactaaggaaaagagcagaagctccttggtttaaccagcacagagaaaataatataaatcccataagggcag

SEQ ID NO: 101 - protein, 685 aa, Homo sapiens
MELLRTITYQPAASTKMCEQALGKGCGADSKKKRPPQPPEESQPPQSQAQVPPAAPHHHHHHSHSGPEISRIIVDPTTGKRYCRGKVLGKGGFAKCYEMTDLTNNKVYAAKIIPHSRVAKPHQREKIDKEIELHRILHHKHVVQFYHYFEDKENIYILLEYCSRRSMAHILKARKVLTEPEVRYYLRQIVSGLKYLHEQEILHRDLKLGNFFINEAMELKVGDFGLAARLEPLEHRRRTICGTPNYLSPEVLNKQGHGCESDIWALGCVMYTMLLGRPPFETTNLKETYRCIREARYTMPSSLLAPAKHLIASMLSKNPEDRPSLDDIIRHDFFLQGFTPDRLSSSCCHTVPDFHLSSPAKNFFKKAAAALFGGKKDKARYIDTHNRVSKEDEDIYKLRHDLKKTSITQQPSKHRTDEELQPPTTTVARSGTPAVENKQQIGDAIRMIVRGTLGSCSSSSECLEDSTMGSVADTVARVLRGCLENMPEADCIPKEQLSTSFQWVTKWVDYSNKYGFGYQLSDHTVGVLFNNGAHMSLLPDKKTVHYYAELGQCSVFPATDAPEQFISQVTVLKYFSHYMEENLMDGGDLPSVTDIRRPRLYLLQWLKSDKALMMLFNDGTFQVNFYHDHTKIIICSQNEEYLLTYINEDRISTTFRLTTLLMSGCSSELKNRMEYALNMLLQRCN

SEQ ID NO: 102 - DNA, 2783 bp, Homo sapiens
  CDS (128)..(2182)
gcacaagtggaccggggtgttgggtgctagtcggcaccagaggcaagggtgcgaggaccacggccggctcggacgtgtgaccgcgcctagggggtggcagcgggcagtgcggggcggcaaggcgaccatggagcttttgcggactatcacctaccagccagccgccagcaccaaaatgtgcgagcaggcgctgggcaagggttgcggagcagactcgaagaagaagcggccgccgcagccccccgaggaatcgcagccacctcagtcccaggcgcaagtgcccccggcggcccctcaccaccatcaccaccattcgcactcggggccggagatctcgcggattatcgtcgaccccacgactgggaagcgctactgccggggcaaagtgctgggaaagggtggctttgcaaaatgttacgagatgacagatttgacaaataacaaagtctacgccgcaaaaattattcctcacagcagagtagctaaacctcatcaaagggaaaagattgacaaagaaatagagcttcacagaattcttcatcataagcatgtagtgcagttttaccactacttcgaggacaaagaaaacatttacattctcttggaatactgcagtagaaggtcaatggctcatattttgaaagcaagaaaggtgttgacagagccagaagttcgatactacctcaggcagattgtgtctggactgaaataccttcatgaacaagaaatcttgcacagagatctcaaactagggaacttttttattaatgaagccatggaactaaaagttggggacttcggtctggcagccaggctagaacccttggaacacagaaggagaacgatatgtggtaccccaaattatctctctcctgaagtcctcaacaaacaaggacatggctgtgaatcagacatttgggccctgggctgtgtaatgtatacaatgttactagggaggcccccatttgaaactacaaatctcaaagaaacttataggtgcataagggaagcaaggtatacaatgccgtcctcattgctggctcctgccaagcacttaattgctagtatgttgtccaaaaacccagaggatcgtcccagtttggatgacatcattcgacatgacttttttttgcagggcttcactccggacagactgtcttctagctgttgtcatacagttccagatttccacttatcaagcccagctaagaatttctttaagaaagcagctgctgctctttttggtggcaaaaaagacaaagcaagatatattgacacacataatagagtgtctaaagaagatgaagacatctacaagcttaggcatgatttgaaaaagacttcaataactcagcaacccagcaaacacaggacagatgaggagctccagccacctaccaccacagttgccaggtctggaacacccgcagtagaaaacaagcagcagattggggatgctattcggatgatagtcagagggactcttggcagctgtagcagcagcagtgaatgccttgaagacagtaccatgggaagtgttgcagacacagtggcaagggttcttcggggatgtctggaaaacatgccggaagctgattgcattcccaaagagcagctgagcacatcatttcagtgggtcaccaaatgggttgattactctaacaaatatggctttgggtaccagctctcagaccacaccgtcggtgtccttttcaacaatggtgctcacatgagcctccttccagacaaaaaaacagttcactattacgcagagcttggccaatgctcagttttcccagcaacagatgctcctgagcaatttattagtcaagtgacggtgctgaaatacttttctcattacatggaggagaacctcatggatggtggagatctgcctagtgttactgatattcgaagacctcggctctacctccttcagtggctaaaatctgataaggccctaatgatgctctttaatgatggcacctttcaggtgaatttctaccatgatcatacaaaaatcatcatctgtagccaaaatgaagaataccttctcacctacatcaatgaggataggatatctacaactttcaggctgacaactctgctgatgtctggctgttcatcagaattaaaaaatcgaatggaatatgccctgaacatgctcttacaaagatgtaactgaaagacttttcgaatggaccctatgggactcctcttttccactgtgagatctacagggaacccaaaagaatgatctagagtatgttgaagaagatggacatgtggtggtacgaaaacaattcccctgtggcctgctggactgggtggaaccagaacaggctaaggcatacagttcttgactttggacaatccaagagtgaaccagaatgcagttttccttgagatacctgttttaaaaggtttttcagacaattttgcagaaaggtgcattgattcttaaattctctctgttgagagcatttcagccagaggactttggaactgtgaatatacttcctgaaggggagggagaagggaggaagctcccatgttgtttaaaggctgtaattggagcagcttttggctgcgtaactgtgaactatggccatatataattttttttcattaatttttgaagatacttgtggctggaaaagtgcattccttgttaataaactttttatttattacagcccaaagagcagtatttattatcaaaatgtctttttttttatgttgaccattttaaaccgttggcaataaagagtatgaaaacgcag

SEQ ID NO: 103 - protein, 161 aa, Homo sapiens
MSVPGPYQAATGPSSAPSAPPSYEETVAVNSYYPTPPAPMPGPTTGLVTGPDGKGMNPPSYYTQPAPIPNNNPITVQTVYVQHPITFLDRPIQMCCPSCNKMIVSQLSYNAGALTWLSCGSLCLLGCIAGCCFIPFCVDALQDVDHYCPNCRALLGTYKRL

SEQ ID NO: 104 - DNA, 1589 bp, Homo sapiens
  CDS (70)..(552)
ccttttctcggggcgcccgaaggccagctcagacctcccggctcgacaggcggcgcgggcggcggtaaaatgtcggttccaggaccttaccaggcggccactgggccttcctcagcaccatccgcacctccatcctatgaagagacagtggctgttaacagttattaccccacacctccagctcccatgcctgggccaactacggggcttgtgacggggcctgatgggaagggcatgaatcctccttcgtattatacccagccagcgcccatccccaataacaatccaattaccgtgcagacggtctacgtgcagcaccccatcacctttttggaccgccctatccaaatgtgttgtccttcctgcaacaagatgatcgtgagtcagctgtcctataacgccggtgctctgacctggctgtcctgcgggagcctgtgcctgctggggtgcatagcgggctgctgcttcatccccttctgcgtggatgccctgcaggacgtggaccattactgtcccaactgcagagctctcctgggcacctacaagcgtttgtaggactcagccagacgtggagggagccgggtgccgcaggaagtcctttccacctctcatccagcttcacgcctggtggaggttctgccctggtggtctcacctctccagggggcccaccttcatgtcttcttttggggggaatacgtcgcaaaactaacaaatctccaaaccccagaaattgctgcttggagtcgtgcataggacttgcaaagacattccccttgagtgtcagttccacggtttcctgcctccctgagaccctgagtcctgccatctaactgtgatcattgccctatccgaatatcttcctgtgatctgccatcagtggctcttttttcctgcttccatgggcctttctggtggcagtctcaaactgagaagccacagttgccttatttttgaggctgttctgcccagagctcggctgaaccagcctttagtgcctaccattatcttatccgtctcttcccgtccctgatgacaaagatcttgccttacagactttacaggcttggctttgagattctgtaactgcagacttcattagcacacagattcactttaatttcttaattttttttttaaatacaaggagggggctattaacacccagtacagacatatccacaaggtcgtaaatgcatgctagaaaaatagggctggatcttatcactgccctgtctccccttgtttctctgtgccagatcttcagtgcccctttccatacagggatttttttctcatagagtaattatatgaacagtttttatgacctccttttggtctgaaatactttcgaacagaatttcttttttttaaaaaaaaacagagatggggtcttactatgttgcccaggctggtgtcgaactcctgggctcaagcgatccttctgccttggcctcccgaagtgctgggattgcaggcataagctaccatgctgggcctgaacataatttcaagaggaggatttataaaaccattttctgtaatcaaatgattggtgtcattttcccatttgccaatgtagtctcactt

SEQ ID NO: 105 - protein, 161 aa, Homo sapiens
MSVPGPYQAATGPSSAPSAPPSYEETVAVNSYYPTPPAPMPGPTTGLVTGPDGKGMNPPSYYTQPAPIPNNNPITVQTVYVQHPITFLDRPVQMCCPSCNKMIVSQLSYNAGALTWLSCGSLCLLGCIAGCCFIPFCVDALQDVDHYCPNCRALLGTYKRL

SEQ ID NO: 106 - DNA, 1589 bp, Homo sapiens
  CDS (70)..(552)
ccttttctcggggcgcccgaaggccagctcagacctcccggctcgacaggcggcgcgggcggcggtaaaatgtcggttccaggaccttaccaggcggccactgggccttcctcagcaccatccgcacctccatcctatgaagagacagtggctgttaacagttattaccccacacctccagctcccatgcctgggccaactacggggcttgtgacggggcctgatgggaagggcatgaatcctccttcgtattatacccagccagcgcccatccccaataacaatccaattaccgtgcagacggtctacgtgcagcaccccatcacctttttggaccgccctgtccaaatgtgttgtccttcctgcaacaagatgatcgtgagtcagctgtcctataacgccggtgctctgacctggctgtcctgcgggagcctgtgcctgctggggtgcatagcgggctgctgcttcatccccttctgcgtggatgccctgcaggacgtggaccattactgtcccaactgcagagctctcctgggcacctacaagcgtttgtaggactcagccagacgtggagggagccgggtgccgcaggaagtcctttccacctctcatccagcttcacgcctggtggaggttctgccctggtggtctcacctctccagggggcccaccttcatgtcttcttttggggggaatacgtcgcaaaactaacaaatctccaaaccccagaaattgctgcttggagtcgtgcataggacttgcaaagacattccccttgagtgtcagttccacggtttcctgcctccctgagaccctgagtcctgccatctaactgtgatcattgccctatccgaatatcttcctgtgatctgccatcagtggctcttttttcctgcttccatgggcctttctggtggcagtctcaaactgagaagccacagttgccttatttttgaggctgttctgcccagagctcggctgaaccagcctttagtgcctaccattatcttatccgtctcttcccgtccctgatgacaaagatcttgccttacagactttacaggcttggctttgagattctgtaactgcagacttcattagcacacagattcactttaatttcttaattttttttttaaatacaaggagggggctattaacacccagtacagacatatccacaaggtcgtaaatgcatgctagaaaaatagggctggatcttatcactgccctgtctccccttgtttctctgtgccagatcttcagtgcccctttccatacagggatttttttctcatagagtaattatatgaacagtttttatgacctccttttggtctgaaatactttcgaacagaatttcttttttttaaaaaaaaacagagatggggtcttactatgttgcccaggctggtgtcgaactcctgggctcaagcgatccttctgccttggcctcccgaagtgctgggattgcaggcataagctaccatgctgggcctgaacataatttcaagaggaggatttataaaaccattttctgtaatcaaatgattggtgtcattttcccatttgccaatgtagtctcactt

SEQ ID NO: 107 - protein, 249 aa, Homo sapiens
MASASGAMAKHEQILVLDPPTDLKFKGPFTDVVTTNLKLRNPSDRKVCFKVKTTAPRRYCVRPNSGIIDPGSTVTVSVMLQPFDYDPNEKSKHKFMVQTIFAPPNTSDMEAVWKEAKPDELMDSKLRCVFEMPNENDKLNDMEPSKAVPLNASKQDGPMPKPHSVSLNDTETRKLMEECKRLQGEMMKLSEENRHLRDEGLRLRKVAHSDKPGSTSTASFRDNVTSPLPSLLVVIAAIFIGFFLGKFIL

SEQ ID NO: 108 - DNA, 1595 bp, Homo sapiens
  CDS (232)..(978)
agtgcgcgtggccgtggcggctggtgtggggttgagtcagttgtgggacccggagctgctgacccagcgggtggcccaccgaaccggtgacacagcggcaggcgttagggctcgggagccgcgagcctggcctcgtcctagagctcggccgagccgtcgccgccgtcgtcccccgcccccagtcagcaaaccgccgccgcgggcgcgcccccgctctgcgctgtctctccgatggcgtccgcctcaggggccatggcgaagcacgagcagatcctggtcctcgatccgcccacagacctcaaattcaaaggccccttcacagatgtagtcactacaaatcttaaattgcgaaatccatcggatagaaaagtgtgtttcaaagtgaagactacagcacctcgccggtactgtgtgaggcccaacagtggaattattgacccagggtcaactgtgactgtttcagtaatgctacagccctttgactatgatccgaatgaaaagagtaaacacaagtttatggtacagacaatttttgctccaccaaacacttcagatatggaagctgtgtggaaagaggcaaaacctgatgaattaatggattccaaattgagatgcgtatttgaaatgcccaatgaaaatgataaattgaatgatatggaacctagcaaagctgttccactgaatgcatctaagcaagatggacctatgccaaaaccacacagtgtttcacttaatgataccgaaacaaggaaactaatggaagagtgtaaaagacttcagggagaaatgatgaagctatcagaagaaaatcggcacctgagagatgaaggtttaaggctcagaaaggtagcacattcggataaacctggatcaacctcaactgcatccttcagagataatgtcaccagtcctcttccttcacttcttgttgtaattgcagccattttcattggattctttctagggaaattcatcttgtagagtgaagcatgcagagtgctgtttctttttttttttttctcttgaccagaaaaagatttgtttacctaccatttcattggtagtatggcccacggtgaccatttttttgtgtgtacagcgtcatataggctttgcctttaatgatctcttacggttagaaaacacaataaaaacaaactgttcggctactggacaggttgtatattaccagatcatcactagcagatgtcagttgcacattgagtcctttatgaaattcataaataaagaattgttctttctttgtggttttaataagagttcaagaattgttcagagtcttgtaaatgttattttaataatccctttaaattttatctgttgctgttacctcttgaaatatgatttatttagattgctaatcccactcattcaggaaatgccaagaggtattccttggggaaatggtgcctcttacagtgtaaatttttcctcctttacctttgctaatatcatggcagaatttttcttatcccttgtgaggcagttgttgactgagtttttcatccttacaatcctgtcccatggtatttaacataaaaaaaaataaaactgttaacagattcttgctcgat

SEQ ID NO: 109 - protein, 540 aa, Homo sapiens
MGTTARAALVLTYLAVASAASEGGFTATGQRQLRPEHFQEVGYAAPPSPPLSRSLPMDHPDSSQHGPPFEGQSQVQPPPSQEATPLQQEKLLPAQLPAEKEVGPPLPQEAVPLQKELPSLQHPNEQKEGTPAPFGDQSHPEPESWNAAQHCQQDRSQGGWGHRLDGFPPGRPSPDNLNQICLPNRQHVVYGPWNLPQSSYSHLTRQGETLNFLEIGYSRCCHCRSHTNRLECAKLVWEEAMSRFCEAEFSVKTRPHWCCTRQGEARFSCFQEEAPQPHYQLRACPSHQPDISSGLELPFPPGVPTLDNIKNICHLRRFRSVPRNLPATDPLQRELLALIQLEREFQRCCRQGNNHTCTWKAWEDTLDKYCDREYAVKTHHHLCCRHPPSPTRDECFARRAPYPNYDRDILTIDIGRVTPNLMGHLCGNQRVLTKHKHIPGLIHNMTARCCDLPFPEQACCAEEEKLTFINDLCGPRRNIWRDPALCCYLSPGDEQVNCFNINYLRNVALVSGDTENAKGQGEQGSTGGTNISSTSEPKEE

SEQ ID NO: 110 - DNA, 1810 bp, Homo sapiens
  CDS (102)..(1721)
aaccgtaacagccaccagacaagcttcagtggccggcccttcacatccagacttgcctgagaggacccacctctgagtgtccagtggtcagttgccccaggatggggaccacagccagagcagccttggtcttgacctatttggctgttgcttctgctgcctctgagggaggcttcacggctacaggacagaggcagctgaggccagagcactttcaagaagttggctacgcagctcccccctccccacccctatcccgaagcctccccatggatcaccctgactcctctcagcatggccctccctttgagggacagagtcaagtgcagccccctccctctcaggaggccacccctctccaacaggaaaagctgctacctgcccaactccctgctgaaaaggaagtgggtccccctctccctcaggaagctgtccccctccaaaaagagctgccctctctccagcaccccaatgaacagaaggaaggaacgccagctccatttggggaccagagccatccagaacctgagtcctggaatgcagcccagcactgccaacaggaccggtcccaagggggctggggccaccggctggatggcttcccccctgggcggccttctccagacaatctgaaccaaatctgccttcctaaccgtcagcatgtggtatatggtccctggaacctaccacagtccagctactcccacctcactcgccagggtgagaccctcaatttcctggagattggatattcccgctgctgccactgccgcagccacacaaaccgcctagagtgtgccaaacttgtgtgggaggaagcaatgagccgattctgtgaggccgagttctcggtcaagacccgaccccactggtgctgcacgcggcagggggaggctcggttctcctgcttccaggaggaagctccccagccacactaccagctccgggcctgccccagccatcagcctgatatttcctcgggtcttgagctgcctttccctcctggggtgcccacattggacaatatcaagaacatctgccacctgaggcgcttccgctctgtgccacgcaacctgccagctactgaccccctacaaagggagctgctggcactgatccagctggagagggagttccagcgctgctgccgccaggggaacaatcacacctgtacatggaaggcctgggaggatacccttgacaaatactgtgaccgggagtatgctgtgaagacccaccaccacttgtgttgccgccaccctcccagccctactcgggatgagtgctttgcccgtcgggctccttaccccaactatgaccgggacatcttgaccattgacatcggtcgagtcacccccaacctcatgggccacctctgtggaaaccaaagagttctcaccaagcataaacatattcctgggctgatccacaacatgactgcccgctgctgtgacctgccatttccagaacaggcctgctgtgcagaggaggagaaattaaccttcatcaatgatctgtgtggtccccgacgtaacatctggcgagaccctgccctctgctgttacctgagtcctggggatgaacaggtcaactgcttcaacatcaattatctgaggaacgtggctctagtgtctggagacactgagaacgccaagggccagggggagcagggctcaactggaggaacaaatatcagctccacctctgagcccaaggaagaatgagtcaccccagagccctagagggtcagatggggggaaccccaccctgccccacccatctgaacactcattacactaaacacctcttg

SEQ ID NO: 111 - protein, 540 aa, Homo sapiens
MGTTARAALVLTYLAVASAASEGGFTATGQRQLRPEHFQEVGYAAPPSPPLSRSLPMDHPDSSQHGPPFEGQSQVQPPPSQEATPLQQEKLLPAQLPAEKEVGPPLPQEAVPLQKELPSLQHPNEQKEGTPAPFGDQSHPEPESWNAAQHCQQDRSQGGWGHRLDGFPPGRPSPDNLNQICLPNRQHVVYGPWNLPQSSYSHLTRQGETLNFLEIGYSRCCHCRSHTNRLECAKLVWEEAMSRFCEAEFSVKTRPHWCCTRQGEARFSCFQEEAPQPHYQLRACPSHQPDISSGLELPFPPGVPTLDNIKNICHLRRFRSVPRNLPATDPLQRELLALIQLEREFQRCCRQGNNHTCTWKAWEDTLDKYCDREYAVKTHHHLCCRHPPSPTRDECFARRAPYPNYDRDILTIDISRVTPNLMGHLCGNQRVLTKHKHIPGLIHNMTARCCDLPFPEQACCAEEEKLTFINDLCGPRRNIWRDPALCCYLSPGDEQVNCFNINYLRNVALVSGDTENAKGQGEQGSTGGTNISSTSEPKEE

SEQ ID NO: 112 - DNA, 1810 bp, Homo sapiens
  CDS (102)..(1721)
aaccgtaacagccaccagacaagcttcagtggccggcccttcacatccagacttgcctgagaggacccacctctgagtgtccagtggtcagttgccccaggatggggaccacagccagagcagccttggtcttgacctatttggctgttgcttctgctgcctctgagggaggcttcacggctacaggacagaggcagctgaggccagagcactttcaagaagttggctacgcagctcccccctccccacccctatcccgaagcctccccatggatcaccctgactcctctcagcatggccctccctttgagggacagagtcaagtgcagccccctccctctcaggaggccacccctctccaacaggaaaagctgctacctgcccaactccctgctgaaaaggaagtgggtccccctctccctcaggaagctgtccccctccaaaaagagctgccctctctccagcaccccaatgaacagaaggaaggaacgccagctccatttggggaccagagccatccagaacctgagtcctggaatgcagcccagcactgccaacaggaccggtcccaagggggctggggccaccggctggatggcttcccccctgggcggccttctccagacaatctgaaccaaatctgccttcctaaccgtcagcatgtggtatatggtccctggaacctaccacagtccagctactcccacctcactcgccagggtgagaccctcaatttcctggagattggatattcccgctgctgccactgccgcagccacacaaaccgcctagagtgtgccaaacttgtgtgggaggaagcaatgagccgattctgtgaggccgagttctcggtcaagacccgaccccactggtgctgcacgcggcagggggaggctcggttctcctgcttccaggaggaagctccccagccacactaccagctccgggcctgccccagccatcagcctgatatttcctcgggtcttgagctgcctttccctcctggggtgcccacattggacaatatcaagaacatctgccacctgaggcgcttccgctctgtgccacgcaacctgccagctactgaccccctacaaagggagctgctggcactgatccagctggagagggagttccagcgctgctgccgccaggggaacaatcacacctgtacatggaaggcctgggaggatacccttgacaaatactgtgaccgggagtatgctgtgaagacccaccaccacttgtgttgccgccaccctcccagccctactcgggatgagtgctttgcccgtcgggctccttaccccaactatgaccgggacatcttgaccattgacatcagtcgagtcacccccaacctcatgggccacctctgtggaaaccaaagagttctcaccaagcataaacatattcctgggctgatccacaacatgactgcccgctgctgtgacctgccatttccagaacaggcctgctgtgcagaggaggagaaattaaccttcatcaatgatctgtgtggtccccgacgtaacatctggcgagaccctgccctctgctgttacctgagtcctggggatgaacaggtcaactgcttcaacatcaattatctgaggaacgtggctctagtgtctggagacactgagaacgccaagggccagggggagcagggctcaactggaggaacaaatatcagctccacctctgagcccaaggaagaatgagtcaccccagagccctagagggtcagatggggggaaccccaccctgccccacccatctgaacactcattacactaaacacctcttg

SEQ ID NO: 113 - protein, 382 aa, Homo sapiens
MGDWSALGKLLDKVQAYSTAGGKVWLSVLFIFRILLLGTAVESAWGDEQSAFRCNTQQPGCENVCYDKSFPISHVRFWVLQIIFVSVPTLLYLAHVFYVMRKEEKLNKKEEELKVAQTDGVNVDMHLKQIEIKKFKYGIEEHGKVKMRGGLLRTYIISILFKSIFEVAFLLIQWYIYGFSLSAVYTCKRDPCPHQVDCFLSRPTEKTIFIIFMLVVSLVSLALNIIELFYVFFKGVKDRVKGKSDPYHATSGALSPAKDCGSQKYAYFNGCSSPTAPLSPMSPPGYKLVTGDRNNSSCRNYNKQASEQTWANYSAEQNRMGQAGSTISNSHAQPFDFPDDNQNSKKLAAGHELQPLAIVDQRPSSRASSRASSRPRPDDLEI

SEQ ID NO: 114 - DNA, 3074 bp, Homo sapiens
  CDS (201)..(1346)
aacttttacgaggtatcagcacttttctttcattagggggaaggcgtgaggaaagtaccaaacagcagcggagttttaaactttaaatagacaggtctgagtgcctgaacttgccttttcattttacttcatcctccaaggagttcaatcacttggcgtgacttcactacttttaagcaaaagagtggtgcccaggcaacatgggtgactggagcgccttaggcaaactccttgacaaggttcaagcctactcaactgctggagggaaggtgtggctgtcagtacttttcattttccgaatcctgctgctggggacagcggttgagtcagcctggggagatgagcagtctgcctttcgttgtaacactcagcaacctggttgtgaaaatgtctgctatgacaagtctttcccaatctctcatgtgcgcttctgggtcctgcagatcatatttgtgtctgtacccacactcttgtacctggctcatgtgttctatgtgatgcgaaaggaagagaaactgaacaagaaagaggaagaactcaaggttgcccaaactgatggtgtcaatgtggacatgcacttgaagcagattgagataaagaagttcaagtacggtattgaagagcatggtaaggtgaaaatgcgaggggggttgctgcgaacctacatcatcagtatcctcttcaagtctatctttgaggtggccttcttgctgatccagtggtacatctatggattcagcttgagtgctgtttacacttgcaaaagagatccctgcccacatcaggtggactgtttcctctctcgccccacggagaaaaccatcttcatcatcttcatgctggtggtgtccttggtgtccctggccttgaatatcattgaactcttctatgttttcttcaagggcgttaaggatcgggttaagggaaagagcgacccttaccatgcgaccagtggtgcgctgagccctgccaaagactgtgggtctcaaaaatatgcttatttcaatggctgctcctcaccaaccgctcccctctcgcctatgtctcctcctgggtacaagctggttactggcgacagaaacaattcttcttgccgcaattacaacaagcaagcaagtgagcaaacctgggctaattacagtgcagaacaaaatcgaatggggcaggcgggaagcaccatctctaactcccatgcacagccttttgatttccccgatgataaccagaattctaaaaaactagctgctggacatgaattacagccactagccattgtggaccagcgaccttcaagcagagccagcagtcgtgccagcagcagacctcggcctgatgacctggagatctagatacaggcttgaaagcatcaagattccactcaattgtggagaagaaaaaaggtgctgtagaaagtgcaccaggtgttaattttgatccggtggaggtggtactcaacagccttattcatgaggcttagaaaacacaaagacattagaatacctaggttcactgggggtgtatggggtagatgggtggagagggaggggataagagaggtgcatgttggtatttaaagtagtggattcaaagaacttagattataaataagagttccattaggtgatacatagataagggctttttctccccgcaaacacccctaagaatggttctgtgtatgtgaatgagcgggtggtaattgtggctaaatatttttgttttaccaagaaactgaaataattctggccaggaataaatacttcctgaacatcttaggtcttttcaacaagaaaaagacagaggattgtccttaagtccctgctaaaacattccattgttaaaatttgcactttgaaggtaagctttctaggcctgaccctccaggtgtcaatggacttgtgctactatatttttttattcttggtatcagtttaaaattcagacaaggcccacagaataagattttccatgcatttgcaaatacgtatattctttttccatccacttgcacaatatcattaccatcactttttcatcattcctcagctactactcacattcatttaatggtttctgtaaacatttttaagacagttgggatgtcacttaacattttttttttgagctaaagtcagggaatcaagccatgcttaatatttaacaatcacttatatgtgtgtcgaagagtttgttttgtttgtcatgtattggtacaagcagatacagtataaactcacaaacacagatttgaaaataatgcacatatggtgttcaaatttgaacctttctcatggatttttgtggtgtgggccaatatggtgtttacattatataattcctgctgtggcaagtaaagcacactttttttttctcctaaaatgtttttccctgtgtatcctattatggatactggttttgttaattatgattctttattttctctcctttttttaggatatagcagtaatgctattactgaaatgaatttcctttttctgaaatgtaatcattgatgcttgaatgatagaattttagtactgtaaacaggctttagtcattaatgtgagagacttagaaaaaaatgcttagagtggactattaaatgtgcctaaatgaattttgcagtaactggtattcttgggttttcctacttaatacacagtaattcagaacttgtattctattatgagtttagcagtcttttggagtgaccagcaactttgatgtttgcactaagattttatttggaatgcaagagaggttgaaagaggattcagtagtacacatacaactaatttatttgaactatatgttgaagacatctaccagtttctccaaatgccttttttaaaactcatcacagaagattggtgaaaatgctgagtatgacacttttcttcttgcatgcatgtcagctacataaacagttttgtacaatgaaaattactaatttgtttgacattccatgttaaactacggtcatgttcagcttcattgcatgtaatgtagacctagtccatcagatcatgtgttctggagagtgttctttattcaataaagttttaatttagtat

SEQ ID NO: 115 - protein, 382 aa, Homo sapiens
MGDWSALGKLLDKVQAYSTAGGKVWLSVLFIFRILLLGTAVESAWGDEQSAFRCNTQQPGCENVCYDKSFPISHVRFWVLQIIFVSVPTLLYLAHVFYVMRKEEKLNKKEEELKVAQTDGVNVDMHLKQIEIKKFKYGIEEHGKVKMRGGLLRTYIISILFKSIFEVAFLLIQWYIYGFSLSAVYTCKRDPCPHQVDCFLSRPTEKTIFIIFMLVVSLVSLALNIIELFYVFFKGVKDRVKGKSDPYHATSGALSPAKDCGSQKYAYFNGCSSPTAPLSPMSPPGYKLVTGDRNNSSCRNYNKQASEQNWANYSAEQNRMGQAGSTISNSHAQPFDFPDDNQNSKKLAAGHELQPLAIVDQRPSSRASSRASSRPRPDDLEI

SEQ ID NO: 116 - DNA, 3074 bp, Homo sapiens
  CDS (201)..(1346)
aacttttacgaggtatcagcacttttctttcattagggggaaggcgtgaggaaagtaccaaacagcagcggagttttaaactttaaatagacaggtctgagtgcctgaacttgccttttcattttacttcatcctccaaggagttcaatcacttggcgtgacttcactacttttaagcaaaagagtggtgcccaggcaacatgggtgactggagcgccttaggcaaactccttgacaaggttcaagcctactcaactgctggagggaaggtgtggctgtcagtacttttcattttccgaatcctgctgctggggacagcggttgagtcagcctggggagatgagcagtctgcctttcgttgtaacactcagcaacctggttgtgaaaatgtctgctatgacaagtctttcccaatctctcatgtgcgcttctgggtcctgcagatcatatttgtgtctgtacccacactcttgtacctggctcatgtgttctatgtgatgcgaaaggaagagaaactgaacaagaaagaggaagaactcaaggttgcccaaactgatggtgtcaatgtggacatgcacttgaagcagattgagataaagaagttcaagtacggtattgaagagcatggtaaggtgaaaatgcgaggggggttgctgcgaacctacatcatcagtatcctcttcaagtctatctttgaggtggccttcttgctgatccagtggtacatctatggattcagcttgagtgctgtttacacttgcaaaagagatccctgcccacatcaggtggactgtttcctctctcgccccacggagaaaaccatcttcatcatcttcatgctggtggtgtccttggtgtccctggccttgaatatcattgaactcttctatgttttcttcaagggcgttaaggatcgggttaagggaaagagcgacccttaccatgcgaccagtggtgcgctgagccctgccaaagactgtgggtctcaaaaatatgcttatttcaatggctgctcctcaccaaccgctcccctctcgcctatgtctcctcctgggtacaagctggttactggcgacagaaacaattcttcttgccgcaattacaacaagcaagcaagtgagcaaaactgggctaattacagtgcagaacaaaatcgaatggggcaggcgggaagcaccatctctaactcccatgcacagccttttgatttccccgatgataaccagaattctaaaaaactagctgctggacatgaattacagccactagccattgtggaccagcgaccttcaagcagagccagcagtcgtgccagcagcagacctcggcctgatgacctggagatctagatacaggcttgaaagcatcaagattccactcaattgtggagaagaaaaaaggtgctgtagaaagtgcaccaggtgttaattttgatccggtggaggtggtactcaacagccttattcatgaggcttagaaaacacaaagacattagaatacctaggttcactgggggtgtatggggtagatgggtggagagggaggggataagagaggtgcatgttggtatttaaagtagtggattcaaagaacttagattataaataagagttccattaggtgatacatagataagggctttttctccccgcaaacacccctaagaatggttctgtgtatgtgaatgagcgggtggtaattgtggctaaatatttttgttttaccaagaaactgaaataattctggccaggaataaatacttcctgaacatcttaggtcttttcaacaagaaaaagacagaggattgtccttaagtccctgctaaaacattccattgttaaaatttgcactttgaaggtaagctttctaggcctgaccctccaggtgtcaatggacttgtgctactatatttttttattcttggtatcagtttaaaattcagacaaggcccacagaataagattttccatgcatttgcaaatacgtatattctttttccatccacttgcacaatatcattaccatcactttttcatcattcctcagctactactcacattcatttaatggtttctgtaaacatttttaagacagttgggatgtcacttaacattttttttttgagctaaagtcagggaatcaagccatgcttaatatttaacaatcacttatatgtgtgtcgaagagtttgttttgtttgtcatgtattggtacaagcagatacagtataaactcacaaacacagatttgaaaataatgcacatatggtgttcaaatttgaacctttctcatggatttttgtggtgtgggccaatatggtgtttacattatataattcctgctgtggcaagtaaagcacactttttttttctcctaaaatgtttttccctgtgtatcctattatggatactggttttgttaattatgattctttattttctctcctttttttaggatatagcagtaatgctattactgaaatgaatttcctttttctgaaatgtaatcattgatgcttgaatgatagaattttagtactgtaaacaggctttagtcattaatgtgagagacttagaaaaaaatgcttagagtggactattaaatgtgcctaaatgaattttgcagtaactggtattcttgggttttcctacttaatacacagtaattcagaacttgtattctattatgagtttagcagtcttttggagtgaccagcaactttgatgtttgcactaagattttatttggaatgcaagagaggttgaaagaggattcagtagtacacatacaactaatttatttgaactatatgttgaagacatctaccagtttctccaaatgccttttttaaaactcatcacagaagattggtgaaaatgctgagtatgacacttttcttcttgcatgcatgtcagctacataaacagttttgtacaatgaaaattactaatttgtttgacattccatgttaaactacggtcatgttcagcttcattgcatgtaatgtagacctagtccatcagatcatgtgttctggagagtgttctttattcaataaagttttaatttagtat

SEQ ID NO: 117 - protein, 398 aa, Homo sapiens
MEGAALLRVSVLCIWMSALFLGVGVRAEEAGARVQQNVPSGTDTGDPQSKPLGDWAAGTMDPESSIFIEDAIKYFKEKVSTQNLLLLLTDNEAWNGFVAAAELPRNEADELRKALDNLARQMIMKDKNWHDKGQQYRNWFLKEFPRLKSKLEDNIRRLRALADGVQKVHKGTTIANVVSGSLSISSGILTLVGMGLAPFTEGGSLVLLEPGMELGITAALTGITSSTIDYGKKWWTQAQAHDLVIKSLDKLKEVKEFLGENISNFLSLAGNTYQLTRGIGKDIRALRRARANLQSVPHASASRPRVTEPISAESGEQVERVNEPSILEMSRGVKLTDVAPVSFFLVLDVVYLVYESKHLHEGAKSETAEELKKVAQELEEKLNILNNNYKILQADQEL

SEQ ID NO: 118 - DNA, 2054 bp, Homo sapiens
  CDS (76)..(1269)
cacacagctcagaacagctggatcttgctcagtctctgccaggggaagattccttggaggaggccctgcagcgacatggagggagctgctttgctgagagtctctgtcctctgcatctggatgagtgcacttttccttggtgtgggagtgagggcagaggaagctggagcgagggtgcaacaaaacgttccaagtgggacagatactggagatcctcaaagtaagcccctcggtgactgggctgctggcaccatggacccagagagcagtatctttattgaggatgccattaagtatttcaaggaaaaagtgagcacacagaatctgctactcctgctgactgataatgaggcctggaacggattcgtggctgctgctgaactgcccaggaatgaggcagatgagctccgtaaagctctggacaaccttgcaagacaaatgatcatgaaagacaaaaactggcacgataaaggccagcagtacagaaactggtttctgaaagagtttcctcggttgaaaagtaagcttgaggataacataagaaggctccgtgcccttgcagatggggttcagaaggtccacaaaggcaccaccatcgccaatgtggtgtctggctctctcagcatttcctctggcatcctgaccctcgtcggcatgggtctggcacccttcacagagggaggcagccttgtactcttggaacctgggatggagttgggaatcacagcagctttgaccgggattaccagcagtaccatagactacggaaagaagtggtggacacaagcccaagcccacgacctggtcatcaaaagccttgacaaattgaaggaggtgaaggagtttttgggtgagaacatatccaactttctttccttagctggcaatacttaccaactcacacgaggcattgggaaggacatccgtgccctcagacgagccagagccaatcttcagtcagtaccgcatgcctcagcctcacgcccccgggtcactgagccaatctcagctgaaagcggtgaacaggtggagagagttaatgaacccagcatcctggaaatgagcagaggagtcaagctcacggatgtggcccctgtaagcttctttcttgtgctggatgtagtctacctcgtgtacgaatcaaagcacttacatgagggggcaaagtcagagacagctgaggagctgaagaaggtggctcaggagctggaggagaagctaaacattctcaacaataattataagattctgcaggcggaccaagaactgtgaccacagggcagggcagccaccaggagagatatgcctggcaggggccaggacaaaatgcaaactttttttttttctgagacagagtcttgctctgtcgccaagttgcagtgagccgagatatcgccactgcactccagcctgggtgacagagcgagactccatctcaaaaaaaaaaaaaaaaagaatatattgacggaagaatagagaggaggcttgaaggaaccagcaatgagaaggccaggaaaagaaagagctgaaaatggagaaagcccaagagttagaacagttggatacaggagaagaaacagcggctccactacagacccagccccaggttcaatgtcctccgaagaatgaagtctttccctggtgatggtcccctgccctgtctttccagcatccactctcccttgtcctcctgggggcatatctcagtcaggcagcggcttcctgatgatggtcgttggggtggttgtcatgtgatgggtcccctccaggttactaaagggtgcatgtcccctgcttgaacactgaagggcaggtggtgagccatggccatggtccccagctgaggagcaggtgtccctgagaacccaaacttcccagagagtatgtgagaaccaaccaatgaaaacagtcccatcgctcttacccggtaagtaaacagtcagaaaattagcatgaaagcagtttagcattgggaggaagctcagatctctagagctgtcttgtccccgcccaggattgacctgtgtaagtcccaataaactcacctactcatc

SEQ ID NO: 119 - protein, 398 aa, Homo sapiens
MEGAALLRVSVLCIWMSALFLGVRVRAEEAGARVQQNVPSGTDTGDPQSKPLGDWAAGTMDPESSIFIEDAIKYFKEKVSTQNLLLLLTDNEAWNGFVAAAELPRNEADELRKALDNLARQMIMKDKNWHDKGQQYRNWFLKEFPRLKSKLEDNIRRLRALADGVQKVHKGTTIANVVSGSLSISSGILTLVGMGLAPFTEGGSLVLLEPGMELGITAALTGITSSTIDYGKKWWTQAQAHDLVIKSLDKLKEVKEFLGENISNFLSLAGNTYQLTRGIGKDIRALRRARANLQSVPHASASRPRVTEPISAESGEQVERVNEPSILEMSRGVKLTDVAPVSFFLVLDVVYLVYESKHLHEGAKSETAEELKKVAQELEEKLNILNNNYKILQADQEL

SEQ ID NO: 120 - DNA, 2054 bp, Homo sapiens
  CDS (76)..(1269)
cacacagctcagaacagctggatcttgctcagtctctgccaggggaagattccttggaggaggccctgcagcgacatggagggagctgctttgctgagagtctctgtcctctgcatctggatgagtgcacttttccttggtgtgagagtgagggcagaggaagctggagcgagggtgcaacaaaacgttccaagtgggacagatactggagatcctcaaagtaagcccctcggtgactgggctgctggcaccatggacccagagagcagtatctttattgaggatgccattaagtatttcaaggaaaaagtgagcacacagaatctgctactcctgctgactgataatgaggcctggaacggattcgtggctgctgctgaactgcccaggaatgaggcagatgagctccgtaaagctctggacaaccttgcaagacaaatgatcatgaaagacaaaaactggcacgataaaggccagcagtacagaaactggtttctgaaagagtttcctcggttgaaaagtaagcttgaggataacataagaaggctccgtgcccttgcagatggggttcagaaggtccacaaaggcaccaccatcgccaatgtggtgtctggctctctcagcatttcctctggcatcctgaccctcgtcggcatgggtctggcacccttcacagagggaggcagccttgtactcttggaacctgggatggagttgggaatcacagcagctttgaccgggattaccagcagtaccatagactacggaaagaagtggtggacacaagcccaagcccacgacctggtcatcaaaagccttgacaaattgaaggaggtgaaggagtttttgggtgagaacatatccaactttctttccttagctggcaatacttaccaactcacacgaggcattgggaaggacatccgtgccctcagacgagccagagccaatcttcagtcagtaccgcatgcctcagcctcacgcccccgggtcactgagccaatctcagctgaaagcggtgaacaggtggagagagttaatgaacccagcatcctggaaatgagcagaggagtcaagctcacggatgtggcccctgtaagcttctttcttgtgctggatgtagtctacctcgtgtacgaatcaaagcacttacatgagggggcaaagtcagagacagctgaggagctgaagaaggtggctcaggagctggaggagaagctaaacattctcaacaataattataagattctgcaggcggaccaagaactgtgaccacagggcagggcagccaccaggagagatatgcctggcaggggccaggacaaaatgcaaactttttttttttctgagacagagtcttgctctgtcgccaagttgcagtgagccgagatatcgccactgcactccagcctgggtgacagagcgagactccatctcaaaaaaaaaaaaaaaaagaatatattgacggaagaatagagaggaggcttgaaggaaccagcaatgagaaggccaggaaaagaaagagctgaaaatggagaaagcccaagagttagaacagttggatacaggagaagaaacagcggctccactacagacccagccccaggttcaatgtcctccgaagaatgaagtctttccctggtgatggtcccctgccctgtctttccagcatccactctcccttgtcctcctgggggcatatctcagtcaggcagcggcttcctgatgatggtcgttggggtggttgtcatgtgatgggtcccctccaggttactaaagggtgcatgtcccctgcttgaacactgaagggcaggtggtgagccatggccatggtccccagctgaggagcaggtgtccctgagaacccaaacttcccagagagtatgtgagaaccaaccaatgaaaacagtcccatcgctcttacccggtaagtaaacagtcagaaaattagcatgaaagcagtttagcattgggaggaagctcagatctctagagctgtcttgtccccgcccaggattgacctgtgtaagtcccaataaactcacctactcatc

SEQ ID NO: 121 - protein, 108 aa, Homo sapiens
MGVQVETISPGDGRTFPKRGQTCVVHYTGMLEDGKKFDSSRDRNKPFKFMLGKQEVIRGWEEGVAQMSVGQRAKLTISPDYAYGATGHPGIIPPHATLVFDVELLKLE

SEQ ID NO: 122 - DNA, 1546 bp, Homo sapiens
  CDS (89)..(412)
actaggcagagccgtggaaccgccgccaggtcgctgttggtccacgccgcccgtcgcgccgcccgcccgctcagcgtccgccgccgccatgggagtgcaggtggaaaccatctccccaggagacgggcgcaccttccccaagcgcggccagacctgcgtggtgcactacaccgggatgcttgaagatggaaagaaatttgattcctcccgggacagaaacaagccctttaagtttatgctaggcaagcaggaggtgatccgaggctgggaagaaggggttgcccagatgagtgtgggtcagagagccaaactgactatatctccagattatgcctatggtgccactgggcacccaggcatcatcccaccacatgccactctcgtcttcgatgtggagcttctaaaactggaatgacaggaatggcctcctcccttagctccctgttcttggatctgccatggagggatctggtgcctccagacatgtgcacatgaatccatatggagcttttcctgatgttccactccactttgtatagacatctgccctgactgaatgtgttctgtcactcagctttgcttccgacacctctgtttcctcttcccctttctcctcgtatgtgtgtttacctaaactatatgccataaacctcaagttactcattttattttgttttcattttggggtgaagattcagtttcagtcttttggatataggtttccaattaagtacatggtcaagtattaacagcacaagtggtaggttaacattagaataggaattggtgttggggggggggtttgcaagaatattttattttaattttttggatgaaatttttatctattatatattaaacattcttgctgctgcgctgcaaagccatagcagatttgaggcgctgttgaggactgaattactctccaagttgagagatgtctttgggttaaattaaaagccctacctaaaactgaggtggggatggggagagcctttgcctccaccattcccacccaccctccccttaaaccctctgcctttgaaagtagatcatgttcactgcaatgctggacactacaggtatctgtccctgggccagcagggacctctgaagccttctttgtggcctttttttttttttcatcctgtggtttttctaatggactttcaggaattttgtaatctcataactttccaagctccaccacttcctaaatcttaagaactttaattgacagtttcaattgaaggtgctgtttgtagacttaacacccagtgaaagcccagccatcatgacaaatccttgaatgttctcttaagaaaatgatgctggtcatcgcagcttcagcatctcctgttttttgatgcttggctccctctgctgatctcagtttcctggcttttcctccctcagccccttctcacccctttgctgtcctgtgtagtgatttggtgagaaatcgttgctgcacccttcccccagcaccatttatgagtctcaagttttattattgcaataaaagtgctttatgccggcttttctc

SEQ ID NO: 123 - protein, 679 aa, Homo sapiens
MATLITSTTAATAASGPLVDYLWMLILGFIIAFVLAFSVGANDVANSFGTAVGSGVVTLKQACILASIFETVGSVLLGAKVSETIRKGLIDVEMYNSTQGLLMAGSVSAMFGSAVWQLVASFLKLPISGTHCIVGATIGFSLVAKGQEGVKWSELIKIVMSWFVSPLLSGIMSGILFFLVRAFILHKADPVPNGLRALPVFYACTVGINLFSIMYTGAPLLGFDKLPLWGTILISVGCAVFCALIVWFFVCPRMKRKIEREIKCSPSESPLMEKKNSLKEDHEETKLSVGDIENKHPVSEVGPATVPLQAVVEERTVSFKLGDLEEAPERERLPSVDLKEETSIDSTVNGAVQLPNGNLVQFSQAVSNQINSSGHYQYHTVHKDSGLYKELLHKLHLAKVGDCMGDSGDKPLRRNNSYTSYTMAICGMPLDSFRAKEGEQKGEEMEKLTWPNADSKKRIRMDSYTSYCNAVSDLHSASEIDMSVKAEMGLGDRKGSNGSLEEWYDQDKPEVSLLFQFLQILTACFGSFAHGGNDVSNAIGPLVALYLVYDTGDVSSKVATPIWLLLYGGVGICVGLWVWGRRVIQTMGKDLTPITPSSGFSIELASALTVVIASNIGLPISTTHCKVGSVVSVGWLRSKKAVDWRLFRNIFMAWFVTVPISGVISAAIMAIFRYVILRM

SEQ ID NO: 124 - DNA, 2916 bp, Homo sapiens
  CDS (81)..(2117)
tttttgatacctcatattctgtttacacatcttgaaaggcgctcagtagttctcttactaaacaaccactactccagagaatggcaacgctgattaccagtactacagctgctaccgccgcttctggtcctttggtggactacctatggatgctcatcctgggcttcattattgcatttgtcttggcattctccgtgggagccaatgatgtagcaaattcttttggtacagctgtgggctcaggtgtagtgaccctgaagcaagcctgcatcctagctagcatctttgaaacagtgggctctgtcttactgggggccaaagtgagcgaaaccatccggaagggcttgattgacgtggagatgtacaactcgactcaagggctgctgatggccggctcagtcagtgctatgtttggttctgctgtgtggcaactcgtggcttcgtttttgaagctccctatttctggaacccattgtattgttggtgcaactattggtttctccctcgtggcaaaggggcaggagggtgtcaagtggtctgaactgataaaaattgtgatgtcttggttcgtgtccccactgctttctggaattatgtctggaattttattcttcctggttcgtgcattcatcctccataaggcagatccagttcctaatggtttgcgagctttgccagttttctatgcctgcacagttggaataaacctcttttccatcatgtatactggagcaccgttgctgggctttgacaaacttcctctgtggggtaccatcctcatctcggtgggatgtgcagttttctgtgcccttatcgtctggttctttgtatgtcccaggatgaagagaaaaattgaacgagaaataaagtgtagtccttctgaaagccccttaatggaaaaaaagaatagcttgaaagaagaccatgaagaaacaaagttgtctgttggtgatattgaaaacaagcatcctgtttctgaggtagggcctgccactgtgcccctccaggctgtggtggaggagagaacagtctcattcaaacttggagatttggaggaagctccagagagagagaggcttcccagcgtggacttgaaagaggaaaccagcatagatagcaccgtgaatggtgcagtgcagttgcctaatgggaaccttgtccagttcagtcaagccgtcagcaaccaaataaactccagtggccactaccagtatcacaccgtgcataaggattccggcctgtacaaagagctactccataaattacatcttgccaaggtgggagattgcatgggagactccggtgacaaacccttaaggcgcaataatagctatacttcctataccatggcaatatgtggcatgcctctggattcattccgtgccaaagaaggtgaacagaagggcgaagaaatggagaagctgacatggcctaatgcagactccaagaagcgaattcgaatggacagttacaccagttactgcaatgctgtgtctgaccttcactcagcatctgagatagacatgagtgtcaaggcagagatgggtctaggtgacagaaaaggaagtaatggctctctagaagaatggtatgaccaggataagcctgaagtctctctcctcttccagttcctgcagatccttacagcctgctttgggtcattcgcccatggtggcaatgacgtaagcaatgccattgggcctctggttgctttatatttggtttatgacacaggagatgtttcttcaaaagtggcaacaccaatatggcttctactctatggtggtgttggtatctgtgttggtctgtgggtttggggaagaagagttatccagaccatggggaaggatctgacaccgatcacaccctctagtggcttcagtattgaactggcatctgccctcactgtggtgattgcatcaaatattggccttcccatcagtacaacacattgtaaagtgggctctgttgtgtctgttggctggctccggtccaagaaggctgttgactggcgtctctttcgtaacatttttatggcctggtttgtcacagtccctatttctggagttatcagtgctgccatcatggcaatcttcagatatgtcatcctcagaatgtgaagctgtttgagattaaaatttgtgtcaatgtttgggaccatcttaggtattcctgctcccctgaagaatgattacagtgttaacagaagactgacaagagtctttttatttgggagccagaggagggaagtgttacttgtgctataactgcttttgtgctaaatatgaattgtctcaaaattagctgtgtaaaatagcccgggttccactggctcctgctgaggtcccctttccttctgggctgtgaattcctgtacatatttctctactttttgtatcaggcttcaattccattatgttttaatgttgtctctgaagatgacttgtgatttttttttcttttttttaaaccatgaagagccgtttgacagagcatgctctgcgttgttggtttcaccagcttctgccctcacatgcacagggatttaacaacaaaaatataactacaacttcccttgtagtctcttatataagtagagtccttggtactctgccctcctgtcagtagtggcaggatctattggcatattcgggagcttcttagagggatgaggttctttgaacacagtgaaaatttaaattagtaacttttttgcaagcagtttattgactgttattgctaagaagaagtaagaaagaaaaagcctgttggcaatcttggttatttctttaagatttctggcagtgtgggatggatgaatgaagtggaatgtgaactttgggcaagttaaatgggacagccttccatgttcatttgtctacctcttaactgaataaaaaagcctacagtttttag

SEQ ID NO: 125 - protein, 288 aa, Homo sapiens
MERPQPDSMPQDLSEALKEATKEVHTQAENAEFMRNFQKGQVTRDGFKLVMASLYHIYVALEEEIERNKESPVFAPVYFPEELHRKAALEQDLAFWYGPRWQEVIPYTPAMQRYVKRLHEVGRTEPELLVAHAYTRYLGDLSGGQVLKKIAQKALDLPSSGEGLAFFTFPNIASATKFKQLYRSRMNSLEMTPAVRQRVIEEAKTAFLLNIQLFEELQELLTHDTKDQSPSRAPGLRQRASNKVQDSAPVETPRGKPPLNTRSQAPLLRWVLTLSFLVATVAVGLYAM

SEQ ID NO: 126 - DNA, 1550 bp, Homo sapiens
  CDS (81)..(944)
tcaacgcctgcctcccctcgagcgtcctcagcgcagccgccgcccgcggagccagcacgaacgagcccagcaccggccggatggagcgtccgcaacccgacagcatgccccaggatttgtcagaggccctgaaggaggccaccaaggaggtgcacacccaggcagagaatgctgagttcatgaggaactttcagaagggccaggtgacccgagacggcttcaagctggtgatggcctccctgtaccacatctatgtggccctggaggaggagattgagcgcaacaaggagagcccagtcttcgcccctgtctacttcccagaagagctgcaccgcaaggctgccctggagcaggacctggccttctggtacgggccccgctggcaggaggtcatcccctacacaccagccatgcagcgctatgtgaagcggctccacgaggtggggcgcacagagcccgagctgctggtggcccacgcctacacccgctacctgggtgacctgtctgggggccaggtgctcaaaaagattgcccagaaagccctggacctgcccagctctggcgagggcctggccttcttcaccttccccaacattgccagtgccaccaagttcaagcagctctaccgctcccgcatgaactccctggagatgactcccgcagtcaggcagagggtgatagaagaggccaagactgcgttcctgctcaacatccagctctttgaggagttgcaggagctgctgacccatgacaccaaggaccagagcccctcacgggcaccagggcttcgccagcgggccagcaacaaagtgcaagattctgcccccgtggagactcccagagggaagcccccactcaacacccgctcccaggctccgcttctccgatgggtccttacactcagctttctggtggcgacagttgctgtagggctttatgccatgtgaatgcaggcatgctggctcccagggccatgaactttgtccggtggaaggccttctttctagagagggaattctcttggctggcttccttaccgtgggcactgaaggctttcagggcctccagccctctcactgtgtccctctctctggaaaggaggaaggagcctatggcatcttccccaacgaaaagcacatccaggcaatggcctaaacttcagagggggcgaaggggtcagccctgcccttcagcatcctcagttcctgcagcagagcctggaagacaccctaatgtggcagctgtctcaaacctccaaaagccctgagtttcaagtatccttgttgacacggccatgaccactttccccgtgggccatggcaatttttacacaaacctgaaaagatgttgtgtcttgtgtttttgtcttatttttgttggagccactctgttcctggctcagcctcaaatgcagtatttttgttgtgttctgttgtttttatagcagggttggggtggtttttgagccatgcgtgggtggggagggaggtgtttaacggcactgtggccttggtctaacttttgtgtgaaataataaacaacattgtctg

SEQ ID NO: 127 - protein, 135 aa, Homo sapiens
MACGLVASNLNLKPGECLRVRGEVAPDAKSFVLNLGKDSNNLCLHFNPRFNAHGDANTIVCNSKDGGAWGTEQREAVFPFQPGSVAEVCITFDQANLTVKLPDGYEFKFPNRLNLEAINYMAADGDFKIKCVAFD

SEQ ID NO: 128 - DNA, 507 bp, Homo sapiens
  CDS (50)..(454)
cttctgacagctggtgcgcctgcccgggaacatcctcctggactcaatcatggcttgtggtctggtcgccagcaacctgaatctcaaacctggagagtgccttcgagtgcgaggcgaggtggctcctgacgctaagagcttcgtgctgaacctgggcaaagacagcaacaacctgtgcctgcacttcaaccctcgcttcaacgcccacggcgacgccaacaccatcgtgtgcaacagcaaggacggcggggcctgggggaccgagcagcgggaggctgtctttcccttccagcctggaagtgttgcagaggtgtgcatcaccttcgaccaggccaacctgaccgtcaagctgccagatggatacgaattcaagttccccaaccgcctcaacctggaggccatcaactacatggcagctgacggtgacttcaagatcaaatgtgtggcctttgactgaaatcagccagcccatggcccccaataaaggcagctgcctctgctcccctg

SEQ ID NO: 129 - protein, 662 aa, Homo sapiens
MNKEIPNGNTSELIFNAVHVKDAGFYVCRVNNNFTFEFSQWSQLDVCDIPESFQRSVDGVSESKLQICVEPTSQKLMPGSTLVLQCVAVGSPIPHYQWFKNELPLTHETKKLYMVPYVDLEHQGTYWCHVYNDRDSQDSKKVEIIIGRTDEAVECTEDELNNLGHPDNKEQTTDQPLAKDKVALLIGNMNYREHPKLKAPLVDVYELTNLLRQLDFKVVSLLDLTEYEMRNAVDEFLLLLDKGVYGLLYYAGHGYENFGNSFMVPVDAPNPYRSENCLCVQNILKLMQEKETGLNVFLLDMCRKRNDYDDTIPILDALKVTANIVFGYATCQGAEAFEIQHSGLANGIFMKFLKDRLLEDKKITVLLDEVAEDMGKCHLTKGKQALEIRSSLSEKRALTDPIQGTEYSAESLVRNLQWAKAHELPESMCLKFDCGVQIQLGFAAEFSNVMIIYTSIVYKPPEIIMCDAYVTDFPLDLDIDPKDANKGTPEETGSYLVSKDLPKHCLYTRLSSLQKLKEHLVFTVCLSYQYSGLEDTVEDKQEVNVGKPLIAKLDMHRGLGRKTCFQTCLMSNGPYQSSAATSGGAGHYHSLQDPFHGVYHSHPGNPSNVTPADSCHCSRTPDAFISSFAHHASCHFSRSNVPVETTDEIPFSFSDRLRISEK

SEQ ID NO: 130 - DNA, 2251 bp, Homo sapiens
  CDS (74)..(2059)
cttggctggacagtttgtgaaactgtgttgccgggcaactggacatccttttgttcaatatcagtggttcaaaatgaataaagagattccaaatggaaatacatcagagcttatttttaatgcagtgcatgtaaaagatgcaggcttttatgtctgtcgagttaataacaatttcacctttgaattcagccagtggtcacagctggatgtttgcgacatcccagagagcttccagagaagtgttgatggcgtctctgaatccaagttgcaaatctgtgttgaaccaacttcccaaaagctgatgccaggcagcacattggttttacagtgtgttgctgttggaagccctattcctcactaccagtggttcaaaaatgaattaccattaacacatgagaccaaaaagctatacatggtgccttatgtggatttggaacaccaaggaacctactggtgtcatgtatataatgatcgagacagtcaagatagcaagaaggtagaaatcatcataggaagaacagatgaggcagtggagtgcactgaagatgaattaaataatcttggtcatcctgataataaagagcaaacaactgaccagcctttggcgaaggacaaggttgcccttttgataggaaatatgaattaccgggagcaccccaagctcaaagctcctttggtggatgtgtacgaattgactaacttactgagacagctggacttcaaagtggtttcactgttggatcttactgaatatgagatgcgtaatgctgtggatgagtttttactccttttagacaagggagtatatgggttattatattatgcaggacatggttatgaaaattttgggaacagcttcatggtccccgttgatgctccaaatccatataggtctgaaaattgtctgtgtgtacaaaatatactgaaattgatgcaagaaaaagaaactggacttaatgtgttcttattggatatgtgtaggaaaagaaatgactacgatgataccattccaatcttggatgcactaaaagtcaccgccaatattgtgtttggatatgccacgtgtcaaggagcagaagcttttgaaatccagcattctggattggcaaatggaatctttatgaaatttttaaaagacagattattagaagataagaaaatcactgtgttactggatgaagttgcagaagatatgggtaagtgtcaccttaccaaaggcaaacaggctctagagattcgaagtagtttatctgagaagagagcacttactgatccaatacagggaacagaatattctgctgaatctcttgtgcggaatctacagtgggccaaggctcatgaacttccagaaagtatgtgtcttaagtttgactgtggtgttcagattcaattaggatttgcagctgagttttccaatgtcatgatcatctatacaagtatagtttacaaaccaccggagataataatgtgtgatgcctacgttactgattttccacttgatctagatattgatccaaaagatgcaaataaaggcacacctgaagaaactggcagctacttggtatcaaaggatcttcccaagcattgcctctataccagactcagttcactgcaaaaattaaaggaacatctagtcttcacagtatgtttatcatatcagtactcaggattggaagatactgtagaggacaagcaggaagtgaatgttgggaaacctctcattgctaaattagacatgcatcgaggtttgggaaggaagacttgctttcaaacttgtcttatgtctaatggtccttaccagagttctgcagccacctcaggaggagcagggcattatcactcattgcaagacccattccatggtgtttaccattcacatcctggtaatccaagtaatgttacaccagcagatagctgtcattgcagccggactccagatgcatttatttcaagtttcgctcaccatgcttcatgtcattttagtagaagtaatgtgccagtagagacaactgatgaaataccatttagtttctctgacaggctcagaatttctgaaaaatgacctccttgtttttgaaagttagcataattttagatgcctgtgaaatagtactgcacttacataaagtgagacattgtgaaaaggcaaatttgtatatgtagagaaagaatagtagtaactgtttcatagcaaacttcaggactttgagatgttgaaattacattatttaattacagacttcctctttct

SEQ ID NO: 131 - protein, 824 aa, Homo sapiens
MSLLGDPLQALPPSAAPTGPLLAPPAGATLNRLREPLLRRLSELLDQAPEGRGWRRLAELAGSRGRLRLSCLDLEQCSLKVLEPEGSPSLCLLKLMGEKGCTVTELSDFLQAMEHTEVLQLLSPPGIKITVNPESKAVLAGQFVKLCCRATGHPFVQYQWFKMNKEIPNGNTSELIFNAVHVKDAGFYVCRVNNNFTFEFSQWSQLDVCDIPESFQRSVDGVSESKLQICVEPTSQKLMPGSTLVLQCVAVGSPIPHYQWFKNELPLTHETKKLYMVPYVDLEHQGTYWCHVYNDRDSQDSKKVEIIIGRTDEAVECTEDELNNLGHPDNKEQTTDQPLAKDKVALLIGNMNYREHPKLKAPLVDVYELTNLLRQLDFKVVSLLDLTEYEMRNAVDEFLLLLDKGVYGLLYYAGHGYENFGNSFMVPVDAPNPYRSENCLCVQNILKLMQEKETGLNVFLLDMCRKRNDYDDTIPILDALKVTANIVFGYATCQGAEAFEIQHSGLANGIFMKFLKDRLLEDKKITVLLDEVAEDMGKCHLTKGKQALEIRSSLSEKRALTDPIQGTEYSAESLVRNLQWAKAHELPESMCLKFDCGVQIQLGFAAEFSNVMIIYTSIVYKPPEIIMCDAYVTDFPLDLDIDPKDANKGTPEETGSYLVSKDLPKHCLYTRLSSLQKLKEHLVFTVCLSYQYSGLEDTVEDKQEVNVGKPLIAKLDMHRGLGRKTCFQTCLMSNGPYQSSAATSGGAGHYHSLQDPFHGVYHSHPGNPSNVTPADSCHCSRTPDAFISSFAHHASCHFSRSNVPVETTDEIPFSFSDRLRISEK

SEQ ID NO: 132 - DNA, 2828 bp, Homo sapiens
  CDS (165)..(2636)
ggggcggggagcggacttcctcctctgagggccgtgccgcgctgccagatttgttcttccgcccctgcctccgcggctcggaggcgagcggaaggtgccccggggccgaggcccgtgacggggcgggcgggagccccggcagtccggggtcgccggcgagggccatgtcgctgttgggggacccgctacaggccctgccgccctcggccgcccccacggggccgctgctcgcccctccggccggcgcgaccctcaaccgcctgcgggagccgctgctgcggaggctcagcgagctcctggatcaggcgcccgagggccggggctggaggagactggcggagctggcggggagtcgcgggcgcctccgcctcagttgcctagacctggagcagtgttctcttaaggtactggagcctgaaggaagccccagcctgtgtctgctgaagttaatgggtgaaaaaggttgcacagtcacagaattgagtgatttcctgcaggctatggaacacactgaagttcttcagcttctcagccccccaggaataaagattactgtaaacccagagtcaaaggcagtcttggctggacagtttgtgaaactgtgttgccgggcaactggacatccttttgttcaatatcagtggttcaaaatgaataaagagattccaaatggaaatacatcagagcttatttttaatgcagtgcatgtaaaagatgcaggcttttatgtctgtcgagttaataacaatttcacctttgaattcagccagtggtcacagctggatgtttgcgacatcccagagagcttccagagaagtgttgatggcgtctctgaatccaagttgcaaatctgtgttgaaccaacttcccaaaagctgatgccaggcagcacattggttttacagtgtgttgctgttggaagccctattcctcactaccagtggttcaaaaatgaattaccattaacacatgagaccaaaaagctatacatggtgccttatgtggatttggaacaccaaggaacctactggtgtcatgtatataatgatcgagacagtcaagatagcaagaaggtagaaatcatcataggaagaacagatgaggcagtggagtgcactgaagatgaattaaataatcttggtcatcctgataataaagagcaaacaactgaccagcctttggcgaaggacaaggttgcccttttgataggaaatatgaattaccgggagcaccccaagctcaaagctcctttggtggatgtgtacgaattgactaacttactgagacagctggacttcaaagtggtttcactgttggatcttactgaatatgagatgcgtaatgctgtggatgagtttttactccttttagacaagggagtatatgggttattatattatgcaggacatggttatgaaaattttgggaacagcttcatggtccccgttgatgctccaaatccatataggtctgaaaattgtctgtgtgtacaaaatatactgaaattgatgcaagaaaaagaaactggacttaatgtgttcttattggatatgtgtaggaaaagaaatgactacgatgataccattccaatcttggatgcactaaaagtcaccgccaatattgtgtttggatatgccacgtgtcaaggagcagaagcttttgaaatccagcattctggattggcaaatggaatctttatgaaatttttaaaagacagattattagaagataagaaaatcactgtgttactggatgaagttgcagaagatatgggtaagtgtcaccttaccaaaggcaaacaggctctagagattcgaagtagtttatctgagaagagagcacttactgatccaatacagggaacagaatattctgctgaatctcttgtgcggaatctacagtgggccaaggctcatgaacttccagaaagtatgtgtcttaagtttgactgtggtgttcagattcaattaggatttgcagctgagttttccaatgtcatgatcatctatacaagtatagtttacaaaccaccggagataataatgtgtgatgcctacgttactgattttccacttgatctagatattgatccaaaagatgcaaataaaggcacacctgaagaaactggcagctacttggtatcaaaggatcttcccaagcattgcctctataccagactcagttcactgcaaaaattaaaggaacatctagtcttcacagtatgtttatcatatcagtactcaggattggaagatactgtagaggacaagcaggaagtgaatgttgggaaacctctcattgctaaattagacatgcatcgaggtttgggaaggaagacttgctttcaaacttgtcttatgtctaatggtccttaccagagttctgcagccacctcaggaggagcagggcattatcactcattgcaagacccattccatggtgtttaccattcacatcctggtaatccaagtaatgttacaccagcagatagctgtcattgcagccggactccagatgcatttatttcaagtttcgctcaccatgcttcatgtcattttagtagaagtaatgtgccagtagagacaactgatgaaataccatttagtttctctgacaggctcagaatttctgaaaaatgacctccttgtttttgaaagttagcataattttagatgcctgtgaaatagtactgcacttacataaagtgagacattgtgaaaaggcaaatttgtatatgtagagaaagaatagtagtaactgtttcatagcaaacttcaggactttgagatgttgaaattacattatttaattacagacttcctctttct

SEQ ID NO: 133 - protein, 919 aa, Homo sapiens
MKVARFQKIPNGENETMIPVLTSKKASELPVSEVASILQADLQNGLNKCEVSHRRAFHGWNEFDISEDEPLWKKYISQFKNPLIMLLLASAVISVLMHQFDDAVSITVAILIVVTVAFVQEYRSEKSLEELSKLVPPECHCVREGKLEHTLARDLVPGDTVCLSVGDRVPADLRLFEAVDLSIDESSLTGETTPCSKVTAPQPAATNGDLASRSNIAFMGTLVRCGKAKGVVIGTGENSEFGEVFKMMQAEEAPKTPLQKSMDLLGKQLSFYSFGIIGIIMLVGWLLGKDILEMFTISVSLAVAAIPEGLPIVVTVTLALGVMRMVKKRAIVKKLPIVETLGCCNVICSDKTGTLTKNEMTVTHIFTSDGLHAEVTGVGYNQFGEVIVDGDVVHGFYNPAVSRIVEAGCVCNDAVIRNNTLMGKPTEGALIALAMKMGLDGLQQDYIRKAEYPFSSEQKWMAVKCVHRTQQDRPEICFMKGAYEQVIKYCTTYQSKGQTLTLTQQQRDVYQQEKARMGSAGLRVLALASGPELGQLTFLGLVGIIDPPRTGVKEAVTTLIASGVSIKMITGDSQETAVAIASRLGLYSKTSQSVSGEEIDAMDVQQLSQIVPKVAVFYRASPRHKMKIIKSLQKNGSVVAMTGDGVNDAVALKAADIGVAMGQTGTDVCKEAADMILVDDDFQTIMSAIEEGKGIYNNIKNFVRFQLSTSIAALTLISLATLMNFPNPLNAMQILWINIIMDGPPAQSLGVEPVDKDVIRKPPRNWKDSILTKNLILKILVSSIIIVCGTLFVFWRELRDNVITPRDTTMTFTCFVFFDMFNALSSRSQTKSVFEIGLCSNRMFCYAVLGSIMGQLLVIYFPPLQKVFQTESLSILDLLFLLGLTSSVCIVAEIIKKVERSREKIQKHVSSTSSSFLEV

SEQ ID NO: 134 - DNA, 3612 bp, Homo sapiens
  CDS (427)..(3183)
acggcctcgcggagccggcccggcggaccgtgacgggtcccctcacctcctcttctctcccctccccgcccgccctctctccctcccttcctccctcccgctcgcttcttctcacgccgggagcaggctcccgcctcgcaccgctgccccgcgagcagctcctcttctcccgaggcgcgcggggcgcccccgcgagccccgcggctgagaccccgcagcctggaggagggctgtccggggctttggatgctgctgctaggggtggtgggagcagccgtgggacgcgtggccgggagcgggggtgacagcctgggattccgggggcttctcttccttgtcctcctcctctcctctctattcccagtgtggccgtggctgacactaaagactttgtagccatcaacccgagtgcagtttcgatggaaaatgaaggttgcacgttttcaaaaaatacctaatggtgaaaatgagacaatgattcctgtattgacatcaaaaaaagcaagtgaattaccagtcagtgaagttgcaagcattctccaagctgatcttcagaatggtctaaacaaatgtgaagttagtcataggcgagcctttcatggctggaatgagtttgatattagtgaagatgagccactgtggaagaagtatatttctcagtttaaaaatccccttattatgctgcttctggcttctgcagtcatcagtgttttaatgcatcagtttgatgatgccgtcagtatcactgtggcaatacttatcgttgttacagttgcctttgttcaggaatatcgttcagaaaaatctcttgaagaattgagtaaacttgtgccaccagaatgccattgtgtgcgtgaaggaaaattggagcatacacttgcccgagacttggttccaggtgatacagtttgcctttctgttggggatagagttcctgctgacttacgcttgtttgaggctgtggatctttccattgatgagtccagcttgacaggtgagacaacgccttgttctaaggtgacagctcctcagccagctgcaactaatggagatcttgcatcgagaagtaacattgcctttatgggaacactggtcagatgtggcaaagcaaagggtgttgtcattggaacaggagaaaattctgaatttggggaggtttttaaaatgatgcaagcagaagaggcaccaaaaacccctctgcagaagagcatggacctcttaggaaaacaactttccttttactcctttggtataataggaatcatcatgttggttggctggttactgggaaaagatatcctggaaatgtttactattagtgtaagtttggctgtagcagcaattcctgaaggtctccccattgtggtcacagtgacgctagctcttggtgttatgagaatggtgaagaaaagggccattgtgaaaaagctgcctattgttgaaactctgggctgctgtaatgtgatttgttcagataaaactggaacactgacgaagaatgaaatgactgttactcacatatttacttcagatggtctgcatgctgaggttactggagttggctataatcaatttggggaagtgattgttgatggtgatgttgttcatggattctataacccagctgttagcagaattgttgaggcgggctgtgtgtgcaatgatgctgtaattagaaacaatactctaatggggaagccaacagaaggggccttaattgctcttgcaatgaagatgggtcttgatggacttcaacaagactacatcagaaaagctgaatacccttttagctctgagcaaaagtggatggctgttaagtgtgtacaccgaacacagcaggacagaccagagatttgttttatgaaaggtgcttacgaacaagtaattaagtactgtactacataccagagcaaagggcagaccttgacacttactcagcagcagagagatgtgtaccaacaagagaaggcacgcatgggctcagcgggactcagagttcttgctttggcttctggtcctgaactgggacagctgacatttcttggcttggtgggaatcattgatccacctagaactggtgtgaaagaagctgttacaacactcattgcctcaggagtatcaataaaaatgattactggagattcacaggagactgcagttgcaatcgccagtcgtctgggattgtattccaaaacttcccagtcagtctcaggagaagaaatagatgcaatggatgttcagcagctttcacaaatagtaccaaaggttgcagtattttacagagctagcccaaggcacaagatgaaaattattaagtcgctacagaagaacggttcagttgtagccatgacaggagatggagtaaatgatgcagttgctctgaaggctgcagacattggagttgcgatgggccagactggtacagatgtttgcaaagaggcagcagacatgatcctagtggatgatgattttcaaaccataatgtctgcaatcgaagagggtaaagggatttataataacattaaaaatttcgttagattccagctgagcacgagtatagcagcattaactttaatctcattggctacattaatgaactttcctaatcctctcaatgccatgcagattttgtggatcaatattattatggatggacccccagctcagagccttggagtagaaccagtggataaagatgtcattcgtaaacctcctcgcaactggaaagacagcattttgactaaaaacttgatacttaaaatacttgtttcatcaataatcattgtttgtgggactttgtttgtcttctggcgtgagctacgagacaatgtgattacacctcgagacacaacaatgaccttcacatgctttgtgttttttgacatgttcaatgcactaagttccagatcccagaccaagtctgtgtttgagattggactctgcagtaatagaatgttttgctatgcagttcttggatccatcatgggacaattactagttatttactttcctccgcttcagaaggtttttcagactgagagcctaagcatactggatctgttgtttcttttgggtctcacctcatcagtgtgcatagtggcagaaattataaagaaggttgaaaggagcagggaaaagatccagaagcatgttagttcgacatcatcatcttttcttgaagtatgatgcatattgcattattttatttgcaaactaggaattgcagtctgaggatcatttagaagggcaagttcaagaggatatgaagatttgagaactttttaactattcattgactaaaaatgaacattaatgttaaagacttaagactttaacctgctggcagtcccaaatgaaattatgcaactttgatatcatattccttgatttaaattggcttttgtgattgagtgaaactttataaagcatatggtcagttatttaattaaaaaggcaaaacctgaaccaccttctgcacttaaagaagtctaacagtacaaatacactatctatcttagatagatatatttttttttatttttaaatattgtactatttatggtggtggggctttcttactaatacacaaataaatttaatcatttcaaaggc

SEQ ID NO: 135 - protein, 382 aa, Homo sapiens
MGAFLDKPKMEKHNAQGQGNGLRYGLSSMQGWRVEMEDAHTAVIGLPSGLESWSFFAVYDGHAGSQVAKYCCEHLLDHITNNQDFKGSAGAPSVENVKNGIRTGFLEIDEHMRVMSEKKHGADRSGSTAVGVLISPQHTYFINCGDSRGLLCRNRKVHFFTQDHKPSNPLEKERIQNAGGSVMIQRVNGSLAVSRALGDFDYKCVHGKGPTEQLVSPEPEVHDIERSEEDDQFIILACDGIWDVMGNEELCDFVRSRLEVTDDLEKVCNEVVDTCLYKGSRDNMSVILICFPNAPKVSPEAVKKEAELDKYLECRVEEIIKKQGEGVPDLVHVMRTLASENIPSLPPGGELASKRNVIEAVYNRLNPYKNDDTDSTSTDDMW

SEQ ID NO: 136 - DNA, 2467 bp, Homo sapiens
  CDS (444)..(1589)
acgggagcgcgcgcgggagctagagagcagtggtctcggcgctcgtccggcccgcagcttcgggtcctcaggcggctgttgctccggaacgggtggttggggaggggggggtggggggactctagacagctgaggcgcgaaagcgatgagtcctcggctcttcctcctccttctccgggacccgctctctgcctccctctccaacgcccggatgatctgagccgcgagggcgccgacagccgggggcccggacgcagcccggctcctcccctcctccgccccttccccagcctgacctggcccgccgctgcagcggtgacccctcccccggctgccgccgtcgccgccgcggtgaccccctccccggctgccgccgccgccgcctcggccgaccagggacctgcccgcctgcggctgctccggacctagaggatcaagacataatgggagcatttttagacaagccaaagatggaaaagcataatgcccaggggcagggtaatgggttgcgatatgggctaagcagcatgcaaggctggcgtgttgaaatggaggatgcacatacggctgtgatcggtttgccaagtggacttgaatcgtggtcattctttgctgtgtatgatgggcatgctggttctcaggttgccaaatactgctgtgagcatttgttagatcacatcaccaataaccaggattttaaagggtctgcaggagcaccttctgtggaaaatgtaaagaatggaatcagaacaggttttctggagattgatgaacacatgagagttatgtcagagaagaaacatggtgcagatagaagtgggtcaacagctgtaggtgtcttaatttctccccaacatacttatttcattaactgtggagactcaagaggtttactttgtaggaacaggaaagttcatttcttcacacaagatcacaaaccaagtaatccgctggagaaagaacgaattcagaatgcaggtggctctgtaatgattcagcgtgtgaatggctctctggctgtatcgagggcccttggggattttgattacaaatgtgtccatggaaaaggtcctactgagcagcttgtctcaccagagcctgaagtccatgatattgaaagatctgaagaagatgatcagttcattatccttgcatgtgatggtatctgggatgttatgggaaatgaagagctctgtgattttgtaagatccagacttgaagtcactgatgaccttgagaaagtttgcaatgaagtagtcgacacctgtttgtataagggaagtcgagacaacatgagtgtgattttgatctgttttccaaatgcacccaaagtatcgccagaagcagtgaagaaggaggcagagttggacaagtacctggaatgcagagtagaagaaatcataaagaagcagggggaaggcgtccccgacttagtccatgtgatgcgcacattagcgagtgagaacatccccagcctcccaccagggggtgaattggcaagcaagaggaatgttattgaagccgtttacaatagactgaatccttacaaaaatgacgacactgactctacatcaacagatgatatgtggtaaaactgctcatctagccatggagtttaccttcacctccaaaggagagtacagctcaactttgttgaaacttttaacatccatcctcaactttaaggaaggggatatgacatgggtgagaatgattacatcagagaacttcagcagtacaacagctagcccagaactgattttttttttttttttgtaaatttgagacttatgtaagcgtgatttcaaaccataattcgtgttgtaaatcagactccagcaatttttgttgtatgattttgtttttttgtaaagtgtaattgtccttgtacaaaatgctcatatttaattatgaactgctttaaatcactatcaaagttacaagaaatgtttggcttattgtgtgatgcaacagatatatagccctttcaagtcatgttgtgtttggacttggggttggaacagggagagcagcagccatgtcagctacacgctcaaatgtgcagatgattatggaaaataacctcaaaatcttacaaagctgaacatccaaggagttattgaaaactatcttaaatgttcttggtaggggagttggcattgttgataaagccagtcccttcatttaactgtctttcaggatgttccttcgttgtttccatgagtattgcaggtaataatacagtgtattcataagaatctcaatcttggggctaaatgccttgtttctttgcacctcttttcaagtccttacatttaattactaattgataagcagcagcttcctacatatagtaggaaactgccacatttttgctatcatgattggctgggcctgctgctgttcctagtaagatattctgaattccattttatcaataaagcttgatttaacaaacaagaaactt

SEQ ID NO: 137 - protein, 358 aa, Homo sapiens
MMQRVFRGKLLSNDEVTIKYKDEDGDLITIFDSSDLSFAIQCSRILKLTLFVNGQPRPLESSQVKYLRRELIELRNKVNRLLDSLEPPGEPGPSTNIPENDTVDGREEKSASDSSGKQSTQVMAASMSAFDPLKNQDEINKNVMSAFGLTDDQVSGPPSAPAEDRSGTPDSIASSSSAAHPPGVQPQQPPYTGAQTQAGQMYQQYQQQAGYGAQQPQAPPQQPQQYGIQYSASYSQQTGPQQPQQFQGYGQQPTSQAPAPAFSGQPQQLPAQPPQQYQASNYPAQTYTAQTSQPTNYTVAPASQPGMAPSQPGAYQPRPGFTSLPGSTMTPPPSGPNPYARNRPPFGQGYTQPGPGYR

SEQ ID NO: 138 - DNA, 1519 bp, Homo sapiens
  CDS (11)..(1084)
attagtgctaatgatgcaacgagttttcagaggaaaacttctgagtaatgatgaagtaacaataaagtataaagatgaagatggagatcttataacaatttttgatagttctgacctttcctttgcaattcagtgcagtaggatactgaaactgacattatttgttaatggccagccaagaccccttgaatcaagtcaggtgaaatatctccgtcgagaactgatagaacttcgaaataaagtgaatcgtttattggatagcttggaaccacctggagaaccaggaccttccaccaatattcctgaaaatgatactgtggatggtagggaagaaaagtctgcttctgattcttctggaaaacagtctactcaggttatggcagcaagtatgtctgcttttgatcctttaaaaaaccaagatgaaatcaataaaaatgttatgtcagcgtttggcttaacagatgatcaggtttcagggccacccagtgctcctgcagaagatcgttcaggaacacccgacagcattgcttcctcctcctcagcagctcacccaccaggcgttcagccacagcagccaccatatacaggagctcagactcaagcaggtcagatgtaccaacagtaccagcaacaggccggctatggtgcacagcagccgcaggctccacctcagcagcctcaacagtatggtattcagtattcagcaagctatagtcagcagactggaccccaacaacctcagcagttccagggatatggccagcaaccaacttcccaggcaccagctcctgccttttctggtcagcctcaacaactgcctgctcagccgccacagcagtaccaggcgagcaattatcctgcacaaacttacactgcccaaacttctcagcctactaattatactgtggctcctgcctctcaacctggaatggctccaagccaacctggggcctatcaaccaagaccaggttttacttcacttcctggaagtaccatgacccctcctccaagtgggcctaatccttatgcgcgtaaccgtcctccctttggtcagggctatacccaacctggacctggttatcgataaggaggctcctctacaccaattaatgtagctgctagctattggcctcccaaaagactccagtactattttaatttgtattgaagaagttcagaaatttaaaagcagagcattttttatgatatcattgttggtgttaattgaaagtataatttgctggaacacaaagaccaaaatgaaagttttttcctccctgcttaaaaatgtagcagcttcttagttactttggaacactactcttacatgtataaagtgattgacttgactttctagcttcccttgtccggaggatattaaaatgctagggtgaggtttagccatcttacttggctttttactattaacatgatgtactaaagtagagccctttgagaatacaagatattatgtataaaatgtaacactgatgataggttaataaagatgattgaatcc

SEQ ID NO: 139 - protein, 396 aa, Homo sapiens [sequence omitted]

SEQ ID NO: 140 - DNA, 1641 bp, Homo sapiens
  CDS (19)..(1206)
aacatcctggagtccaccatgaacggacagttggatctaagtgggaagctaatcgtcaaagctcaacttggggaggatattcggcgaattcctattcataatgaagatattacttatgatgaattagtgctaatgatgcaacgagttttcagaggaaaacttctgagtaatgatgaagtaacaataaagtataaagatgaagatggagatcttataacaatttttgatagttctgacctttcctttgcaattcagtgcagtaggatactgaaactgacattatttgttaatggccagccaagaccccttgaatcaagtcaggtgaaatatctccgtcgagaactgatagaacttcgaaataaagtgaatcgtttattggatagcttggaaccacctggagaaccaggaccttccaccaatattcctgaaaatgatactgtggatggtagggaagaaaagtctgcttctgattcttctggaaaacagtctactcaggttatggcagcaagtatgtctgcttttgatcctttaaaaaaccaagatgaaatcaataaaaatgttatgtcagcgtttggcttaacagatgatcaggtttcagggccacccagtgctcctgcagaagatcgttcaggaacacccgacagcattgcttcctcctcctcagcagctcacccaccaggcgttcagccacagcagccaccatatacaggagctcagactcaagcaggtcagatgtaccaacagtaccagcaacaggccggctatggtgcacagcagccgcaggctccacctcagcagcctcaacagtatggtattcagtattcagcaagctatagtcagcagactggaccccaacaacctcagcagttccagggatatggccagcaaccaacttcccaggcaccagctcctgccttttctggtcagcctcaacaactgcctgctcagccgccacagcagtaccaggcgagcaattatcctgcacaaacttacactgcccaaacttctcagcctactaattatactgtggctcctgcctctcaacctggaatggctccaagccaacctggggcctatcaaccaagaccaggttttacttcacttcctggaagtaccatgacccctcctccaagtgggcctaatccttatgcgcgtaaccgtcctccctttggtcagggctatacccaacctggacctggttatcgataaggaggctcctctacaccaattaatgtagctgctagctattggcctcccaaaagactccagtactattttaatttgtattgaagaagttcagaaatttaaaagcagagcattttttatgatatcattgttggtgttaattgaaagtataatttgctggaacacaaagaccaaaatgaaagttttttcctccctgcttaaaaatgtagcagcttcttagttactttggaacactactcttacatgtataaagtgattgacttgactttctagcttcccttgtccggaggatattaaaatgctagggtgaggtttagccatcttacttggctttttactattaacatgatgtactaaagtagagccctttgagaatacaagatattatgtataaaatgtaacactgatgataggttaataaagatgattgaatcc

SEQ ID NO: 141 - protein, 323 aa, Homo sapiens
MAFSGSQAPYLSPAVPFSGTIQGGLQDGLQITVNGTVLSSSGTRFAVNFQTGFSGNDIAFHFNPRFEDGGYVVCNTRQNGSWGPEERKTHMPFQKGMPFDLCFLVQSSDFKVMVNGILFVQYFHRVPFHRVDTISVNGSVQLSYISFQPPGVWPANPAPITQTVIHTVQSAPGQMFSTPAIPPMMYPHPAYPMPFITTILGGLYPSKSILLSGTVLPSAQRFHINLCSGNHIAFHLNPRFDENAVVRNTQIDNSWGSEERSLPRKMPFVRGQSFSVWILCEAHCLKVAVDGQHLFEYYHRLRNLPTINRLEVGGDIQLTHVQT

SEQ ID NO: 142 - DNA, 1616 bp, Homo sapiens
  CDS (72)..(1040)
aagtcgttccctctacaaaggacttcctagtgggtgtgaaaggcagcggtggccacagaggcggcggagagatggccttcagcggttcccaggctccctacctgagtccagctgtccccttttctgggactattcaaggaggtctccaggacggacttcagatcactgtcaatgggaccgttctcagctccagtggaaccaggtttgctgtgaactttcagactggcttcagtggaaatgacattgccttccacttcaaccctcggtttgaagatggagggtacgtggtgtgcaacacgaggcagaacggaagctgggggcccgaggagaggaagacacacatgcctttccagaaggggatgccctttgacctctgcttcctggtgcagagctcagatttcaaggtgatggtgaacgggatcctcttcgtgcagtacttccaccgcgtgcccttccaccgtgtggacaccatctccgtcaatggctctgtgcagctgtcctacatcagcttccagcctcccggcgtgtggcctgccaacccggctcccattacccagacagtcatccacacagtgcagagcgcccctggacagatgttctctactcccgccatcccacctatgatgtacccccaccccgcctatccgatgcctttcatcaccaccattctgggagggctgtacccatccaagtccatcctcctgtcaggcactgtcctgcccagtgctcagaggttccacatcaacctgtgctctgggaaccacatcgccttccacctgaacccccgttttgatgagaatgctgtggtccgcaacacccagatcgacaactcctgggggtctgaggagcgaagtctgccccgaaaaatgcccttcgtccgtggccagagcttctcagtgtggatcttgtgtgaagctcactgcctcaaggtggccgtggatggtcagcacctgtttgaatactaccatcgcctgaggaacctgcccaccatcaacagactggaagtggggggcgacatccagctgacccatgtgcagacataggcggcttcctggccctggggccgggggctggggtgtggggcagtctgggtcctctcatcatccccacttcccaggcccagcctttccaaccctgcctgggatctgggctttaatgcagaggccatgtccttgtctggtcctgcttctggctacagccaccctggaacggagaaggcagctgacggggattgccttcctcagccgcagcagcacctggggctccagctgctggaatcctaccatcccaggaggcaggcacagccagggagaggggaggagtgggcagtgaagatgaagccccatgctcagtcccctcccatcccccacgcagctccaccccagtcccaagccaccagctgtctgctcctggtgggaggtggcctcctcagcccctcctctctgacctttaacctcactctcaccttgcaccgtgcaccaacccttcacccctcctggaaagcaggcctgatggcttcccactggcctccaccacctgaccagagtgttctcttcagaggactggctcctttcccagtgtccttaaaataaagaaatgaaaatgcttgttggcac

SEQ ID NO: 143 - protein, 136 aa, Homo sapiens
MAGAIIENMSTKKLCIVGGILLVFQIIAFLVGGLIAPGPTTAVSYMSVKCVDARKNHHKTKWFVPWGPNHCDKIRDIEEAIPREIEANDIVFSVHIPLPHMALSCGFLDQRHGHLSVCLLTVAFGGRFLQPLMHCV

SEQ ID NO: 144 - DNA, 1252 bp, Homo sapiens
  CDS (225)..(632)
acaatcacagctccgggcattgggggaacccgagccggctgcgccgggggaatccgtgcgggcgccttccgtcccggtcccatcctcgccgcgctccagcacctctgaagttttgcagcgcccagaaaggaggcgaggaaggagggagtgtgtgagaggagggagcaaaaagctcaccctaaaacatttatttcaaggagaaaagaaaaagggggggcgcaaaaatggctggggcaattatagaaaacatgagcaccaagaagctgtgcattgttggtgggattctgctcgtgttccaaatcatcgcctttctggtgggaggcttgattgctccagggcccacaacggcagtgtcctacatgtcggtgaaatgtgtggatgcccgtaagaaccatcacaagacaaaatggttcgtgccttggggacccaatcattgtgacaagatccgagacattgaagaggcaattccaagggaaattgaagccaatgacatcgtgttttctgttcacattcccctcccccacatggctcttagctgtggtttcttggaccagcggcatggacatttgtcagtttgccttctgacggtagcttttggaggaagattcctgcagccactaatgcattgtgtatgataacaaaaactctggtatgacacattttctgtgatcattgttaattagtgacatagtaacatctgtagcagctggttagtaaacctcatgtgggggtggggtgggggtgtattccttgggggatggtttgggccgaatggggagtggaatatttgacatttttcctgttttaaattctaggatagattttaacatcctttgcggtcccagtccaaggtaggctggtgtcatagtcttctcactcctaatccatgaccactgtttttttcctatttatatcaccaggtagcctactgagttaatatttaagttgtcaatagataagtgtccctgttttgtggcataatataactgaatttcatgagaagatttattccaccaggggtatttcagctttgaaaccaaatctgtgtatctaatactaaccaatctgttggatgtgggttttaaaaaatgtttgctaaactacccaagtaagatttactgtattaaatggccttcgggtctgaaaagcttttttaacctcttgcttaaaatgcgttttattttgataagatacttcaaatagcctccaaaagtgtagatccaatcacttaaataaacctgtatgtatatgc

SEQ ID NO: 145 - protein, 468 aa, Homo sapiens
MPVRTITRQNGSCLGDPIIVTRSETLKRQFQFMLFILQLDIAFKLNNQIRENAEVSMDVSLAYRDDAFAEWTEMAHERVPRKLKCTFTSPKTPEHEGRYYECDVLPFMEIGSVAHKFYLLNIRLPVNEKKKINVGIGEIKDIRLVGIHQNGGFTKVWFAMKTFLTPSIFIIMVWYWRRITMMSRPPVLLEKVIFALGISMTFINIPVEWFSIGFDWTWMLLFGDIRQGIFYAMLLSFWIIFCGEHMMDQHERNHIAGYWKQVGPIAVGSFCLFIFDMCERGVQLTNPFYSIWTTDIGTELAMAFIIVAGICLCLYFLFLCFMVFQVFRNISGKQSSLPAMSKVRRLHYEGLIFRFKFLMLITLACAAMTVIFFIVSQVTEGHWKWGGVTVQVNSAFFTGIYGMWNLYVFALMFLYAPSHKNYGEDQSNGMQLPCKSREDCALFVSELYQELFSASKYSFINDNAASGI

SEQ ID NO: 146 - DNA, 1943 bp, Homo sapiens
  CDS (379)..(1782)
acaatcacagctccgggcattgggggaacccgagccggctgcgccgggggaatccgtgcgggcgccttccgtcccggtcccatcctcgccgcgctccagcacctctgaagttttgcagcgcccagaaaggaggcgaggaaggagggagtgtgtgagaggagggagcaaaaagctcaccctaaaacatttatttcaaggagaaaagaaaaagggggggcgcaaaaatggctggggcaattatagaaaacatgagcaccaagaagctgtgcattgttggtgggattctgctcgtgttccaaatcatcgcctttctggtgggaggcttgattgctccagggcccacaacggcagtgtcctacatgtcggtgaaatgtgtggatgcccgtaagaaccatcacaagacaaaatggttcgtgccttggggacccaatcattgtgacaagatccgagacattgaagaggcaattccaattcatgctgtttatcctgcagctggacattgccttcaagctaaacaaccaaatcagagaaaatgcagaagtctccatggacgtttccctggcttaccgtgatgacgcgtttgctgagtggactgaaatggcccatgaaagagtaccacggaaactcaaatgcaccttcacatctcccaagactccagagcatgagggccgttactatgaatgtgatgtccttcctttcatggaaattgggtctgtggcccataagttttaccttttaaacatccggctgcctgtgaatgagaagaagaaaatcaatgtgggaattggggagataaaggatatccggttggtggggatccaccaaaatggaggcttcaccaaggtgtggtttgccatgaagaccttccttacgcccagcatcttcatcattatggtgtggtattggaggaggatcaccatgatgtcccgacccccagtgcttctggaaaaagtcatctttgcccttgggatttccatgacctttatcaatatcccagtggaatggttttccatcgggtttgactggacctggatgctgctgtttggtgacatccgacagggcatcttctatgcgatgcttctgtccttctggatcatcttctgtggcgagcacatgatggatcagcacgagcggaaccacatcgcagggtattggaagcaagtcggacccattgccgttggctccttctgcctcttcatatttgacatgtgtgagagaggggtacaactcacgaatcccttctacagtatctggactacagacattggaacagagctggccatggccttcatcatcgtggctggaatctgcctctgcctctacttcctgtttctatgcttcatggtatttcaggtgtttcggaacatcagtgggaagcagtccagcctgccagctatgagcaaagtccggcggctacactatgaggggctaatttttaggttcaagttcctcatgcttatcaccttggcctgcgctgccatgactgtcatcttcttcatcgttagtcaggtaacggaaggccattggaaatggggcggcgtcacagtccaagtgaacagtgcctttttcacaggcatctatgggatgtggaatctgtatgtctttgctctgatgttcttgtatgcaccatcccataaaaactatggagaagaccagtccaatggaatgcaactcccatgtaaatcgagggaagattgtgctttgtttgtttcggaactttatcaagaattgttcagcgcttcgaaatattccttcatcaatgacaacgcagcttctggtatttgagtcaacaaggcaacacatgtttatcagctttgcatttgcagttgtcacagtcacattgattgtacttgtatacgcacacaaatacactcatttagcctttatctcaaaatgttaaatataaggaaaaaagcgtcaacaataaatattctttgagtatt

SEQ ID NO: 147 - protein, 460 aa, Homo sapiens
MPVRTITRQNGSCLGDPIIVTRSETLKRQFQGKLKPMTSCFLFTFPSPMDVSLAYRDDAFAEWTEMAHERVPRKLKCTFTSPKTPEHEGRYYECDVLPFMEIGSVAHKFYLLNIRLPVNEKKKINVGIGEIKDIRLVGIHQNGGFTKVWFAMKTFLTPSIFIIMVWYWRRITMMSRPPVLLEKVIFALGISMTFINIPVEWFSIGFDWTWMLLFGDIRQGIFYAMLLSFWIIFCGEHMMDQHERNHIAGYWKQVGPIAVGSFCLFIFDMCERGVQLTNPFYSIWTTDIGTELAMAFIIVAGICLCLYFLFLCFMVFQVFRNISGKQSSLPAMSKVRRLHYEGLIFRFKFLMLITLACAAMTVIFFIVSQVTEGHWKWGGITVQVNSAFFTGIYGMWNLYVFALMFLYAPSHKNYGEDQSNGMQLPCKSREDCALFVSELYQELFSASKYSFINDNAASGI

SEQ ID NO: 148 - DNA, 1919 bp, Homo sapiens
  CDS (376)..(1755)
atcacagctccgggcattgggggaacccgagccggctgcgccgggggaatccgtgcgggcgccttccgtcccggtcccatcctcgccgcgctccagcacctctgaagttttgcagcgcccagaaaggaggcgaggaaggagggagtgtatgagaggagggagcaaaaagctcaccctaaaacatttatttcaaggagaaaagaaaaagggggggcgcaaaaatggctggggcaattatagaaaacatgagcaccaagaagctgtgcattgttggtgggattctgctcgtgttccaaatcatcgcctttctggtgggaggcttgattgctccagggcccacaacggcagtgtcctacatgtcggtgaaatgtgtggatgcccgtaagaaccatcacaagacaaaatggttcgtgccttggggacccaatcattgtgacaagatccgagacattgaagaggcaattccaagggaaattgaagccaatgacatcgtgttttctgttcacattcccctcccccatggacgtttccctggcttaccgtgatgacgcgtttgctgagtggactgaaatggcccatgaaagagtaccacggaaactcaaatgcaccttcacatctcccaagactccagagcatgagggccgttactatgaatgtgatgtccttcctttcatggaaattgggtctgtggcccataagttttaccttttaaacatccggctgcctgtgaatgagaagaagaaaatcaatgtgggaattggggagataaaggatatccggttggtggggatccaccaaaatggaggcttcaccaaggtgtggtttgccatgaagaccttccttacgcccagcatcttcatcattatggtgtggtattggaggaggatcaccatgatgtcccgacccccagtgcttctggaaaaagtcatctttgcccttgggatttccatgacctttatcaatatcccagtggaatggttttccatcgggtttgactggacctggatgctgctgtttggtgacatccgacagggcatcttctatgcgatgcttctgtccttctggatcatcttctgtggcgagcacatgatggatcagcacgagcggaaccacatcgcagggtattggaagcaagtcggacccattgccgttggctccttctgcctcttcatatttgacatgtgtgagagaggggtacaactcacgaatcccttctacagtatctggactacagacattggaacagagctggccatggccttcatcatcgtggctggaatctgcctctgcctctacttcctgtttctatgcttcatggtatttcaggtgtttcggaacatcagtgggaagcagtccagcctgccagctatgagcaaagtccggcggctacactatgaggggctaatttttaggttcaagttcctcatgcttatcaccttggcctgcgctgccatgactgtcatcttcttcatcgttagtcaggtaacggaaggccattggaaatggggcggcatcacagtccaagtgaacagtgcctttttcacaggcatctatgggatgtggaatctgtatgtctttgctctgatgttcttgtatgcaccatcccataaaaactatggagaagaccagtccaatggaatgcaactcccatgtaaatcgagggaagattgtgctttgtttgtttcggaactttatcaagaattgttcagcgcttcgaaatattccttcatcaatgacaacgcagcttctggtatttgagtcaacaaggcaacacatgtttatcagctttgcatttgcagttgtcacagtcacattgattgtacttgtatacgcacacaaatacactcatttagcctttatctcaaaatgttaaatataaggaaaaaagcgtcaacaataaatattctttgagtattgtc

SEQ ID NO: 149 - protein, 183 aa, Homo sapiens
MKLLSLVAVVGCLLVPPAEANKSSEDIRCKCICPPYRNISGHIYNQNVSQKDCNCLHVVEPMPVPGHDVEAYCLLCECRYEERSTTTIKVIIVIYLSVVGALLLYMAFLMLVDPLIRKPDAYTEQLHNEEENEDARSMAAAAASLGGPRANTVLERVEGAQQRWKLQVQEQRKTVFDRHKMLS

SEQ ID NO: 150 - DNA, 1562 bp, Homo sapiens
  CDS (120)..(668)
tacggctgcgagaagacgacagaaggggattaagagggagggcggggacaactgggtcttttgcggctgcagcgggcttgtaggtgtccggctttgctggcccagcaagcctgataagcatgaagctcttatctttggtggctgtggtcgggtgtttgctggtgcccccagctgaagccaacaagagttctgaagatatccggtgcaaatgcatctgtccaccttatagaaacatcagtgggcacatttacaaccagaatgtatcccagaaggactgcaactgcctgcacgtggtggagcccatgccagtgcctggccatgacgtggaggcctactgcctgctgtgcgagtgcaggtacgaggagcgcagcaccaccaccatcaaggtcatcattgtcatctacctgtccgtggtgggtgccctgttgctctacatggccttcctgatgctggtggaccctctgatccgaaagccggatgcatatactgagcaactgcacaatgaggaggagaatgaggatgctcgctctatggcagcagctgctgcatccctcgggggaccccgagcaaacacagtcctggagcgtgtggaaggtgcccagcagcggtggaagctgcaggtgcaggagcagcggaagacagtcttcgatcggcacaagatgctcagctagatgggctggtgtggttgggtcaaggccccaacaccatggctgccagcttccaggctggacaaagcagggggctacttctcccttccctcggttccagtcttccctttaaaagcctgtggcatttttcctccttctccctaactttagaaatgttgtacttggctattttgattagggaagagggatgtggtctctgatctccgttgtcttcttgggtctttggggttgaagggagggggaaggcaggccagaagggaatggagacattcgaggcggcctcaggagtggatgcgatctgtctctcctggctccactcttgccgccttccagctctgagtcttgggaatgttgttacccttggaagataaagctgggtcttcaggaactcagtgtctgggaggaaagcatggcccagcattcagcatgtgttcctttctgcagtggttctttatcaccacctccctcccagccccagcgcctcagccccagccccagctccagccctgaggacagctctgatgggagagctgggccccctgagcccactgggtcttcagggtgcactggaagctggtgttcgctgtcccctgtgcacttctcgcactggggcatggagtgcccatgcatactctgctgccggtcccctcacctgcacttgaggggtctgggcagtccctcctctccccagtgtccacagtcactgagccagacggtcggttggaacatgagactcgaggctgagcgtggatctgaacaccacagcccctgtacttgggttgcctcttgtccctgaacttcgttgtaccagtgcatggagagaaaattttgtcctcttgtcttagagttgtgtgtaaatcaaggaagccatcattaaattgttttatttctctc

SEQ ID NO: 151 - DNA, 2815 bp, Homo sapiens
  CDS (192)..(2387)
tctctcctcctcctccagcagccaccagggaccgggagatctaccagctcaagacccctacagccaggtctgtgctgccgccctccagcatctttgcagcaggggacgaggctgtgtgggaggctgtcggttcggaacatgtctccacccaccccaccctctgtggctccaggcttcattctcccccatccatggataacccagggccttcgctccgtggtgcctttggcattctaggtgccttggaaagggacaggctgacccacctgaaacacaagctggggagtctgtgttcaggcagccaggagtcaaagcttctccatgccatggtactcctggctctgggccaggacacggaggccagggtctctctggagtccttgaagatgaacacagtagcccagctggtagcccaccagtgggcagacatggagaccacagagggccctgaggagcctccagacttgtcctggacggtggctcgcctgtaccacctgctggctgaggagaacctgtgtccggcctctacaagggacatggcttaccaggtggcccttcgtgactttgcctcccagggtgaccaccagctgggccaactccagaatgaggcctgggatcggtgcagttcagatatcaagggggaccccagtggtttccagccactccattctcatcagggttccctgcagccaccttcagcatcccctgcagtgaccagaagccagcctcgtcccattgacacaccagactggagttggggacatacgttacactccaccaacagcactgcctcactggccagccacctagagatcagccagtcacccactcttgcctttctctcttcacaccatggaacccatgggcccagcaagctatgtaacacaccgctggacactcaggagcctcagcttgtccctgaaggctgccaagaacctgaggagataagctggcctccatcagtggagaccagtgtctccttagggttaccacacgaaattagcgttccagaggtgtctccagaggaggcttcgcccatcctccctgacgccctggctgctccagacacaagtgtccactgtcccattgaatgcacagagttgtctacaaactccaggtctcccctgacgtccaccacagaaagtgttggaaagcagtggcctattacaagtcagaggtcacctcaggttcctgtaggagatgattctctgcagaacaccacgtcatccagccctcctgcccagccaccatccctccaagcctcccctaagctgcctccttcccctctgtcctctgcttcctccccgagcagctaccctgctcctccaacctccacatcccctgttttggaccactcagaaacatctgatcagaaattctataactttgtggttatccatgccagggctgatgaacaggtggccctacgtattcgggagaagctggagaccctcggggtacctgacggggccaccttctgtgaggaatttcaggtgcccgggcgtggtgagctgcactgtctccaagatgccatcgatcactcggggttcacgatcctgctcctgactgctagctttgattgcagcctgagcctgcatcaaatcaaccatgctctcatgaacagccttacacagtctgggaggcaggactgtgtgatccccctcctcccacttgagtgttcccaggcccagctcagcccagatacaaccagactgctccacagcattgtgtggctggatgaacactccccaatcttcgccagaaaggtggcaaacaccttcaagacacagaagctccaggcacagcgggtacgctggaagaaagcgcaggaggccagaaccctcaaggagcagagcatacagctggaggcagagcggcaaaacgtggcagccatatctgctgcctacacagcctatgtccatagctatagggcctggcaagcagagatgaacaaacttggggtggcttttgggaagaacttgtcactggggactccaacacccagctggcccggatgtccacagccaataccttctcatcctcagggtggtactccagttttcccctattccccacagcctccatccttccctcagcctccatgcttccctcagcctccatccttccctcagcctccatccttcccactgcctccagtctcttccccacagtcccaatcctttccatcagcctcctccccagccccacagactccaggacctcagcctctcattattcaccatgcccagatggttcagctgggtgtcaacaatcacatgtggggccacacaggggcccagtcatctgatgacaagactgagtgttcggagaacccctgtatgggccctctgactgatcagggcgaaccccttcttgagactccagagtgaccaggttggaccccacctagatggctagagtgacaagattggacttcacctgggtccttaaaatgatagtggaggaagggaacctcgcctgggtccccagagtagccagaggacttagcttgggctcccacagtggctattagttggacccagcttgagaccccagaggcagggaagaccacacctataaatcaggcctgggaaacatgcagaaaccccatttgaacagactgtgggactccaatctgaatcctctatgtggacagaggatgatggggccagaggcacctctgaggtgccctcagcgcagcctcgtaaacttcattcactgtgacacatgctgttcatagggtctctctggggaggatgcggtcccggggcacatagggagggtcctgtttttataataaagttattgacaactg

SEQ ID NO: 152 - protein, 732 aa, Homo sapiens
MDNPGPSLRGAFGILGALERDRLTHLKHKLGSLCSGSQESKLLHAMVLLALGQDTEARVSLESLKMNTVAQLVAHQWADMETTEGPEEPPDLSWTVARLYHLLAEENLCPASTRDMAYQVALRDFASQGDHQLGQLQNEAWDRCSSDIKGDPSGFQPLHSHQGSLQPPSASPAVTRSQPRPIDTPDWSWGHTLHSTNSTASLASHLEISQSPTLAFLSSHHGTHGPSKLCNTPLDTQEPQLVPEGCQEPEEISWPPSVETSVSLGLPHEISVPEVSPEEASPILPDALAAPDTSVHCPIECTELSTNSRSPLTSTTESVGKQWPITSQRSPQVPVGDDSLQNTTSSSPPAQPPSLQASPKLPPSPLSSASSPSSYPAPPTSTSPVLDHSETSDQKFYNFVVIHARADEQVALRIREKLETLGVPDGATFCEEFQVPGRGELHCLQDAIDHSGFTILLLTASFDCSLSLHQINHALMNSLTQSGRQDCVIPLLPLECSQAQLSPDTTRLLHSIVWLDEHSPIFARKVANTFKTQKLQAQRVRWKKAQEARTLKEQSIQLEAERQNVAAISAAYTAYVHSYRAWQAEMNKLGVAFGKNLSLGTPTPSWPGCPQPIPSHPQGGTPVFPYSPQPPSFPQPPCFPQPPSFPQPPSFPLPPVSSPQSQSFPSASSPAPQTPGPQPLIIHHAQMVQLGVNNHMWGHTGAQSSDDKTECSENPCMGPLTDQGEPLLETPE

SEQ ID NO: 153 - DNA, 2544 bp, Homo sapiens
  CDS (97)..(2232)
taggggacactgggcgtgcagaaggcggggggcagtgtggaacatgccttcaccacctccagcttctgctgccggaggctgcacccacctgtgcccatggcctgcacaggcccatcacttcctagcgccttcgacattctaggtgcagcaggccaggacaagctcttgtatctgaagcacaaactgaagaccccacgcccaggctgccaggggcaggacctcctgcatgccatggttctcctgaagctgggccaggaaactgaggccaggatctctctagaggcattgaaggccgatgcggtggcccggctggtggcccgccagtgggctggcgtggacagcaccgaggacccagaggagcccccagatgtgtcctgggctgtggcccgcttgtaccacctgctggctgaggagaagctgtgccccgcctcgctgcgggacgtggcctaccaggaagccgtccgcaccctcagctccagggacgaccaccggctgggggaacttcaggatgaggcccgaaaccggtgtgggtgggacattgctggggatccagggagcatccggacgctccagtccaatctgggctgcctcccaccatcctcggctttgccctctgggaccaggagcctcccacgccccattgacggtgtttcggactggagccaagggtgctccctgcgatccactggcagccctgcctccctggccagcaacttggaaatcagccagtcccctaccatgcccttcctcagcctgcaccgcagcccacatgggcccagcaagctctgtgacgacccccaggccagcttggtgcccgagcctgtccccggtggctgccaggagcctgaggagatgagctggccgccatcgggggagattgccagcccaccagagctgccaagcagcccacctcctgggcttcccgaagtggccccagatgcaacctccactggcctccctgatacccccgcagctccagaaaccagcaccaactacccagtggagtgcaccgaggggtctgcaggcccccagtctctccccttgcctattctggagccggtcaaaaacccctgctctgtcaaagaccagacgccactccaactttctgtagaagataccacctctccaaataccaagccgtgcccacctactcccaccaccccagaaacatcccctcctcctcctcctcctcctccttcatctactccttgttcagctcacctgaccccctcctccctgttcccttcctccctggaatcatcatcggaacagaaattctataactttgtgatcctccacgccagggcagacgaacacatcgccctgcgggttcgggagaagctggaggcccttggcgtgcccgacggggccaccttctgcgaggatttccaggtgccggggcgcggggagctgagctgcctgcaggacgccatagaccactcagctttcatcatcctacttctcacctccaacttcgactgtcgcctgagcctgcaccaggtgaaccaagccatgatgagcaacctcacgcgacaggggtcgccagactgtgtcatccccttcctgcccctggagagctccccggcccagctcagctccgacacggccagcctgctctccgggctggtgcggctggacgaacactcccagatcttcgccaggaaggtggccaacaccttcaagccccacaggcttcaggcccgaaaggccatgtggaggaaggaacaggacacccgagccctgcgggaacagagccaacacctggacggtgagcggatgcaggcggcggcactgaacgcagcctactcagcctacctccagagctacttgtcctaccaggcacagatggagcagctccaggtggcttttgggagccacatgtcatttgggactggggcgccctatggggctcgaatgccctttgggggccaggtgcccctgggagccccgccaccctttcccacttggccggggtgcccgcagccgccacccctgcacgcatggcaggctggcacccccccaccgccctccccacagccagcagcctttccacagtcactgcccttcccgcagtccccagccttccctacggcctcacccgcaccccctcagagcccagggctgcaacccctcattatccaccacgcacagatggtacagctggggctgaacaaccacatgtggaaccagagagggtcccaggcgcccgaggacaagacgcaggaggcagaatgaccgcgtgtccttgcctgaccacctggggaacacccctggacccaggcatcggccaggaccccatagagcaccccggtctgccctgtgccctgtggacagtggaagatgaggtcatctgccactttcaggacattgtccgggagcccttcatttaggacaaaacgggcgcgatgatgccctggctttcagggtggtcagaactggatacggtgtttacaattccaatctctctatttctgggtgaagggtcttggtggtgggggtattgctacggtcttttaattataataaatatttattgaatgcttc

SEQ ID NO: 154 - protein, 712 aa, Homo sapiens
MACTGPSLPSAFDILGAAGQDKLLYLKHKLKTPRPGCQGQDLLHAMVLLKLGQETEARISLEALKADAVARLVARQWAGVDSTEDPEEPPDVSWAVARLYHLLAEEKLCPASLRDVAYQEAVRTLSSRDDHRLGELQDEARNRCGWDIAGDPGSIRTLQSNLGCLPPSSALPSGTRSLPRPIDGVSDWSQGCSLRSTGSPASLASNLEISQSPTMPFLSLHRSPHGPSKLCDDPQASLVPEPVPGGCQEPEEMSWPPSGEIASPPELPSSPPPGLPEVAPDATSTGLPDTPAAPETSTNYPVECTEGSAGPQSLPLPILEPVKNPCSVKDQTPLQLSVEDTTSPNTKPCPPTPTTPETSPPPPPPPPSSTPCSAHLTPSSLFPSSLESSSEQKFYNFVILHARADEHIALRVREKLEALGVPDGATFCEDFQVPGRGELSCLQDAIDHSAFIILLLTSNFDCRLSLHQVNQAMMSNLTRQGSPDCVIPFLPLESSPAQLSSDTASLLSGLVRLDEHSQIFARKVANTFKPHRLQARKAMWRKEQDTRALREQSQHLDGERMQAAALNAAYSAYLQSYLSYQAQMEQLQVAFGSHMSFGTGAPYGARMPFGGQVPLGAPPPFPTWPGCPQPPPLHAWQAGTPPPPSPQPAAFPQSLPFPQSPAFPTASPAPPQSPGLQPLIIHHAQMVQLGLNNHMWNQRGSQAPEDKTQEAE

SEQ ID NO: 155 - DNA, 3456 bp, Homo sapiens
  CDS (281)..(3016)
agcattcaaggagctccccaggagaaagagcaagttctgaggagccctctgagcccggaacgtgtccacccggtcatgcccgccgcgcaccagccccgcagtggacttggaggaggaggaggaggagagctctgtggatggcaaaggggaccggaagagcacaggcctgaaactctccaagaagaaagcaaggaggagacacacggatgacccaagcaaggaatgcttcactctgaaatttgacctgaatgtggacattgagacagagatcgtcccagccatgaagaagaagtcactgggggaggtgctgctgcctgtatttgaaaggaagggcattgcgctgggcaaagtggacatctacctggaccagtccaacacacccctgtccctcaccttcgaggcctacaggttcgggggacactaccttcgtgtcaaagccccagccaagcctggagatgagggcaaggtggagcagggcatgaaggactccaagtccctgagtttgccgattctgcggccagctgggaccgggccccccgccctggagcgtgtggacgcccagagccgccgggagagcctggacatcttggcccctggccgccgccgcaagaacatgtcggagttcctgggggaggcgagcatccccgggcaggagccccccacgccctccagctgctctctgcccagcggcagcagtggcagcaccaacactggcgacagctggaagaaccgggcggccagtcgcttcagcggctttttcagctccggccccagcaccagcgcctttggccgggaggtagacaagatggagcagctggagggcaagctgcacacctacagcctcttcgggctgcccaggctgccccgggggctgcgcttcgaccatgactcctgggaggaggagtacgatgaagacgaggatgaggacaatgcctgcctgaggctggaggacagctggcgggagctcattgatgggcatgagaagctgacccggcggcagtgccaccagcaggaggcggtgtgggagctgctgcacacggaggcctcctacatcaggaaactgcgggtgatcatcaacctgttcttgtgctgcctcctgaacctgcaagagtcagggctgctgtgtgaggtggaggcggagcgcctgttcagcaacatcccggagatcgcgcagctgcaccgcaggctgtgggctagcgtgatggcgccggtgctggagaaggcgcggcgcacgcgagcgctgctacagcccggggacttcctcaaaggcttcaagatgttcggctcgctcttcaagccctacatccgctactgcatggaggaggagggctgcatggagtacatgcgcggcctgctgcgcgacaacgacctcttccgggcctacatcacgtgggcggagaagcacccacagtgccagaggctgaagctgagcgacatgctggccaaaccccaccagcggctcaccaagtacccgctgctgctcaagtcggtgctgaggaagaccgaggagccgcgcgccaaggaggccgtcgtcgccatgatcggctccgtggagcgcttcatccaccacgtgaacgcgtgcatgcggcagcggcaggagcggcagcggctggcggccgtggtgagccgcatcgacgcctacgaggtggtggaaagcagcagcgacgaagtggacaagctcctgaaggaatttctgcacctggacttgacagcgcccatccctggcgcctccccggaggagacgcggcagctgctgctggaggggagcctgaggatgaaggaggggaaggacagcaagatggatgtgtactgcttcctcttcacggatctgctgttggtgaccaaagcagtgaagaaggcagagaggaccagggtcatcaggccacccctgctcgtggacaagattgtgtgccgggagctacgggaccctgggtccttcctccttatctacctgaatgagtttcacagtgctgtaggggcctacacgttccaggccagtggccaggccttgtgccgtggctgggtggacaccatttacaatgcccagaaccagctgcaacagctgcgtgcacaggagcccccaggcagtcagcagcccctgcagagcctggaagaggaggaggatgagcaggaggaggaagaggaggaggaggaggaggaggaggaaggcgaggacagtggcacttcagctgccagctcccctaccatcatgcggaaaagcagcggcagccccgactctcagcactgtgcctcagatggctccacggagaccctggccatggttgtggtagagcctggggacacgctgtcctcccccgagttcgacagcggtcctttcagctcccagtctgatgagacctctctcagcaccactgcctcatctgccacgcccaccagtgagctgctgcccctgggtccggtggacggccgctcctgctccatggactctgcctacggcaccctctccccaacctccttacaagactttgtggccccaggcccaatggcagagctagtgcctcgggccccagagtccccacgagttccttcccctccaccctcgccccgtctccgccgccgcacccctgtccagctgttgagctgcccgccccacctgctcaagtctaagtccgaggccagcctcctccagctgctggcaggggctggcacccatgggacaccctctgcccccagccgcagcctgtcagagctctgcctggctgttccagccccaggtattaggactcagggctcccctcaggaagctgggcccagctgggattgccgaggggcccctagccctggcagcggtcctgggctagtcggctgcctggccggggaacctgcaggctcccacaggaagaggtgtggagacctgccctcgggggcctctcccagggtccagcctgagcccccaccaggggtctctgcccagcacaggaagctgaccctggcccagctctaccgaatcaggaccaccctgctgcttaactccacgctcactgcctcggaggtctgagcagagggaggcccccaagagtgccattgaccaagagacagcagacagcctgcctcctggggcgtgccggcacctgcttcagctactgcctcctgtatgcatgagccggatgctgggcaggatccctgcctacgcccgggcccgatttgcgctttgccggactggatggagtggaggaggcccaggccacagtaccaccccacctgcccaggcagcccctcgtcacctactccccgaagttaccagctcagctcgagtcttcagggctgggctcctaggctgcccatcctacttctaccctcactggcctccagtgggattcactcctgccctgcccccaccttcccagtcccacaggccacccctggcttgggctgggttctgtgaagttacgtatttattgagcttttggttcttttataaagacttgtctagac

SEQ ID NO: 156 - protein, 912 aa, Homo sapiens
MKKKSLGEVLLPVFERKGIALGKVDIYLDQSNTPLSLTFEAYRFGGHYLRVKAPAKPGDEGKVEQGMKDSKSLSLPILRPAGTGPPALERVDAQSRRESLDILAPGRRRKNMSEFLGEASIPGQEPPTPSSCSLPSGSSGSTNTGDSWKNRAASRFSGFFSSGPSTSAFGREVDKMEQLEGKLHTYSLFGLPRLPRGLRFDHDSWEEEYDEDEDEDNACLRLEDSWRELIDGHEKLTRRQCHQQEAVWELLHTEASYIRKLRVIINLFLCCLLNLQESGLLCEVEAERLFSNIPEIAQLHRRLWASVMAPVLEKARRTRALLQPGDFLKGFKMFGSLFKPYIRYCMEEEGCMEYMRGLLRDNDLFRAYITWAEKHPQCQRLKLSDMLAKPHQRLTKYPLLLKSVLRKTEEPRAKEAVVAMIGSVERFIHHVNACMRQRQERQRLAAVVSRIDAYEVVESSSDEVDKLLKEFLHLDLTAPIPGASPEETRQLLLEGSLRMKEGKDSKMDVYCFLFTDLLLVTKAVKKAERTRVIRPPLLVDKIVCRELRDPGSFLLIYLNEFHSAVGAYTFQASGQALCRGWVDTIYNAQNQLQQLRAQEPPGSQQPLQSLEEEEDEQEEEEEEEEEEEEGEDSGTSAASSPTIMRKSSGSPDSQHCASDGSTETLAMVVVEPGDTLSSPEFDSGPFSSQSDETSLSTTASSATPTSELLPLGPVDGRSCSMDSAYGTLSPTSLQDFVAPGPMAELVPRAPESPRVPSPPPSPRLRRRTPVQLLSCPPHLLKSKSEASLLQLLAGAGTHGTPSAPSRSLSELCLAVPAPGIRTQGSPQEAGPSWDCRGAPSPGSGPGLVGCLAGEPAGSHRKRCGDLPSGASPRVQPEPPPGVSAQHRKLTLAQLYRIRTTLLLNSTLTASEV

SEQ ID NO: 157 - DNA, 3609 bp, Homo sapiens
  CDS (152)..(3169)
agatgaagaccagggagaggaaagggtggacctgaggcccccatggagaagggacgggcaggatgtatgtcaccacgccgactgccagcagctgcaccgccgggggcccctcaacctctgcgaggcctgtgacagcaagttccacagcaccatgcattatgatgggcatgtccgcttcgaccttcccccacaaggctctgtgctggcccggaacgtgtccacccggtcatgcccgccgcgcaccagccccgcagtggacttggaggaggaggaggaggagagctctgtggatggcaaaggggaccggaagagcacaggcctgaaactctccaagaagaaagcaaggaggagacacacggatgacccaagcaaggaatgcttcactctgaaatttgacctgaatgtggacattgagacagagatcgtcccagccatgaagaagaagtcactgggggaggtgctgctgcctgtatttgaaaggaagggcattgcgctgggcaaagtggacatctacctggaccagtccaacacacccctgtccctcaccttcgaggcctacaggttcgggggacactaccttcgtgtcaaagccccagccaagcctggagatgagggcaaggtggagcagggcatgaaggactccaagtccctgagtttgccgattctgcggccagctgggaccgggccccccgccctggagcgtgtggacgcccagagccgccgggagagcctggacatcttggcccctggccgccgccgcaagaacatgtcggagttcctgggggaggcgagcatccccgggcaggagccccccacgccctccagctgctctctgcccagcggcagcagtggcagcaccaacactggcgacagctggaagaaccgggcggccagtcgcttcagcggctttttcagctccggccccagcaccagcgcctttggccgggaggtagacaagatggagcagctggagggcaagctgcacacctacagcctcttcgggctgcccaggctgccccgggggctgcgcttcgaccatgactcctgggaggaggagtacgatgaagacgaggatgaggacaatgcctgcctgaggctggaggacagctggcgggagctcattgatgggcatgagaagctgacccggcggcagtgccaccagcaggaggcggtgtgggagctgctgcacacggaggcctcctacatcaggaaactgcgggtgatcatcaacctgttcctgtgctgcctcctgaacctgcaagagtcagggctgctgtgtgaggtggaggcggagcgcctgttcagcaacatcccggagatcgcgcagctgcaccgcaggctgtgggctagcgtgatggcgccggtgctggagaaggcgcggcgcacgcgagcgctgctacagcccggggacttcctcaaaggcttcaagatgttcggctcgctcttcaagccctacatccgctactgcatggaggaggagggctgcatggagtacatgcgcggcctgctgcgcgacaacgacctcttccgggcctacatcacgtgggcggagaagcacccacagtgccagaggctgaagctgagcgacatgctggccaaaccccaccagcggctcaccaagtacccgctgctgctcaagtcggtgctgaggaagaccgaggagccgcgcgccaaggaggccgtcgtcgccatgatcggctccgtggagcgcttcatccaccacgtgaacgcgtgcatgcggcagcggcaggagcggcagcggctggcggccgtggtgagccgcatcgacgcctacgaggtggtggaaagcagcagcgacgaagtggacaagctcctgaaggaatttctgcacctggacttgacagcgcccatccctggcgcctccccggaggagacgcggcagctgctgctggaggggagcctgaggatgaaggaggggaaggacagcaagatggatgtgtactgcttcctcttcacggatctgctgttggtgaccaaagcagtgaagaaggcagagaggaccagggtcatcaggccacccctgctcgtggacaagattgtgtgccgggagctacgggaccctgggtccttcctccttatctacctgaatgagtttcacagtgctgtaggggcctacacgttccaggccagtggccaggccttgtgccgtggctgggtggacaccatttacaatgcccagaaccagctgcaacagctgcgtgcacaggagcccccaggcagtcagcagcccctgcagagcctggaagaggaggaggatgagcaggaggaggaagaggaggaggaggaggaggaggaggaaggcgaggacagtggcacttcagctgccagctcccctaccatcatgcggaaaagcagcggcagccccgactctcagcactgtgcctcagatggctccacggagaccctggccatggttgtggtagagcctggggacacgctgtcctcccccgagttcgacagcggtcctttcagctcccagtctgatgagacctctctcagcaccactgcctcatctgccacgcccaccagtgagctgctgcccctgggtccggtggacggccgctcctgctccatggactctgcctacggcaccctctccccaacctccttacaagactttgtggccccaggcccaatggcagagctagtgcctcgggccccagagtccccacgagttccttcccctccaccctcgccccgtctccgccgccgcacccctgtccagctgttgagctgcccgccccacctgctcaagtctaagtccgaggccagcctcctccagctgctggcaggggctggcacccatgggacaccctctgcccccagccgcagcctgtcagagctctgcctggctgttccagccccaggtattaggactcagggctcccctcaggaagctgggcccagctgggattgccgaggggcccctagccctggcagcggtcctgggctagtcggctgcctggccggggaacctgcaggctcccacaggaagaggtgtggagacctgccctcgggggcctctcccagggtccagcctgagcccccaccaggggtctctgcccagcacaggaagctgaccctggcccagctctaccgaatcaggaccaccctgctgcttaactccacgctcactgcctcggaggtctgagcagagggaggcccccaagagtgccattgaccaagagacagcagacagcctgcctcctggggcgtgccggcacctgcttcagctactgcctcctgtatgcatgagccggatgctgggcaggatccctgcctacgcccgggcccgatttgcgctttgccggactggatggagtggaggaggcccaggccacagtaccaccccacctgcccaggcagcccctcgtcacctactccccgaagttaccagctcagctcgagtcttcagggctgggctcctaggctgcccatcctacttctaccctcactggcctccagtgggattcactcctgccctgcccccaccttcccagtcccacaggccacccctggcttgggctgggttctgtgaagttacgtatttattgagcttttggttcttttataaagacttgtctagac

SEQ ID NO: 158 - protein, 1006 aa, Homo sapiens
MHYDGHVRFDLPPQGSVLARNVSTRSCPPRTSPAVDLEEEEEESSVDGKGDRKSTGLKLSKKKARRRHTDDPSKECFTLKFDLNVDIETEIVPAMKKKSLGEVLLPVFERKGIALGKVDIYLDQSNTPLSLTFEAYRFGGHYLRVKAPAKPGDEGKVEQGMKDSKSLSLPILRPAGTGPPALERVDAQSRRESLDILAPGRRRKNMSEFLGEASIPGQEPPTPSSCSLPSGSSGSTNTGDSWKNRAASRFSGFFSSGPSTSAFGREVDKMEQLEGKLHTYSLFGLPRLPRGLRFDHDSWEEEYDEDEDEDNACLRLEDSWRELIDGHEKLTRRQCHQQEAVWELLHTEASYIRKLRVIINLFLCCLLNLQESGLLCEVEAERLFSNIPEIAQLHRRLWASVMAPVLEKARRTRALLQPGDFLKGFKMFGSLFKPYIRYCMEEEGCMEYMRGLLRDNDLFRAYITWAEKHPQCQRLKLSDMLAKPHQRLTKYPLLLKSVLRKTEEPRAKEAVVAMIGSVERFIHHVNACMRQRQERQRLAAVVSRIDAYEVVESSSDEVDKLLKEFLHLDLTAPIPGASPEETRQLLLEGSLRMKEGKDSKMDVYCFLFTDLLLVTKAVKKAERTRVIRPPLLVDKIVCRELRDPGSFLLIYLNEFHSAVGAYTFQASGQALCRGWVDTIYNAQNQLQQLRAQEPPGSQQPLQSLEEEEDEQEEEEEEEEEEEEGEDSGTSAASSPTIMRKSSGSPDSQHCASDGSTETLAMVVVEPGDTLSSPEFDSGPFSSQSDETSLSTTASSATPTSELLPLGPVDGRSCSMDSAYGTLSPTSLQDFVAPGPMAELVPRAPESPRVPSPPPSPRLRRRTPVQLLSCPPHLLKSKSEASLLQLLAGAGTHGTPSAPSRSLSELCLAVPAPGIRTQGSPQEAGPSWDCRGAPSPGSGPGLVGCLAGEPAGSHRKRCGDLPSGASPRVQPEPPPGVSAQHRKLTLAQLYRIRTTLLLNSTLTASEV

SEQ ID NO: 159 - DNA, 3168 bp, Homo sapiens
  CDS (93)..(3089)
agtgcccggtggcccaggagggcctgggagcccgaagccgtccccgagtcgctcctaggtcactggcgcgatgcgggccgtcctctcggctgatgggttggaagcccagcgaggctagaggccagtcccaaagtctccaggcatcagggctgcagcccaggagcctcaaggcggcccggcgggcgactggacggccggacaggtcccgagcagccccgcccaacatggacccagacccccaggcgggcgtgcaggtgggcatgcgggtggtgcgcggcgtggactggaagtggggccagcaggacggcggcgagggcggcgtgggcacggtggtggagcttggccgccacggcagcccctcgacacccgaccgcacagtggtcgtgcagtgggaccagggcacgcgcaccaactaccgcgccggctaccagggcgcgcacgacctgctgctgtacgacaacgcccagatcggcgtccggcaccccaacatcatctgtgactgctgcaagaagcacgggctgcgggggatgcgctggaagtgccgtgtgtgcctggactacgacctctgcacgcagtgctacatgcacaacaagcatgagctcgcccacgccttcgaccgctacgagaccgctcactcgcgccctgtcacactgagtccccgccagggcctcccgaggatcccactaaggggcatcttccagggagcgaaggtggtgcgaggccccttctgggagtggggctcacaggatggaggggaagggaaaccgggccgtgtggtggacatccgtggctgggatgtggagacaggccggagtgtggccagcgtgacgtgggctgatggtaccaccaatgtgtaccgtgtgggccacaagggcaaggtggacctcaagtgtgtgggcgaggcagcgggcggcttctactacaaggaccacctcccaaggctcggcaagccggcggagctgcagcgcagggtgagtgctgacagccagcccttccagcacggggacaaggtcaagtgtctgctggacactgatgtcctgcgggagatgcaggaaggccacggcggctggaaccccaggatggcggagtttatcggacagacgggcaccgtgcatcgtatcacggaccgcggggacgtgcgcgtgcagttcaaccacgagacgcgctggaccttccaccccggggcgctcaccaagcaccactccttctgggtgggcgacgtggtccgggtcatcggcgaccttgacacagtgaagcggctgcaggctgggcatggcgagtggacggacgacatggcccctgccctgggccgcgtcgggaaggtggtgaaagtgtttggagacgggaacctgcgtgtagcagtcgctggtcagcggtggaccttcagcccctcctgcctggtggcctaccggcccgaggaggatgccaacctggacgtggccgagcgcgcccgggagaacaaaagctcactgagcgtggccctggacaagcttcgggcccagaagagtgacccagagcacccgggaaggctggtggtggaggtggcgctgggtaacgcagcccgggctctggacctgctgcggaggcgcccagagcaagtggacaccaagaaccaaggcaggaccgctctgcaagtggctgcctacctgggccaggtggagttgatacggctgctgctacaagccagggcgggcgtggacctgccggacgacgagggcaacacggcactgcactacgcggccctggggaaccagcccgaggccaccagggtgctcctgagtgctgggtgccgggcggacgccatcaacagcacccagagcacagcactgcacgtggccgtgcagaggggcttcctggaggtggtgcgggccctgtgtgagcgcggctgtgacgtcaacctgcccgacgcccactcggacacgcccctgcactccgccatctcggcgggcactggagccagcggcattgtcgaggtcctcacggaggtgccaaacatcgatgttaccgccaccaacagccagggtttcaccctgctgcaccatgcctccctcaagggtcacgcgctagctgtgagaaagattctggctcgggcgcggcagctggtggacgccaagaaggaggacggcttcacggcgctgcatctggctgccctcaacaaccaccgcgaggtggcccagatcctcatccgggagggccgctgtgacgtgaacgtgcgcaaccggaagctgcagtccccgctgcatctcgccgtgcaacaggcccacgtggggctggtgccgctactggtggacgctgggtgcagtgtcaacgccgaggacgaggagggggacacagccctgcacgtggcgctgcagcgtcatcagctgctgcccctggtggctgatggggccgggggggacccagggcccttgcagctgctgtccaggctacaggcctcgggcctccccggcagcgcggagctgacggtgggcgcggcggtcgcctgcttcctggcgctggagggcgccgacgtgagctacaccaaccaccgcggtcggagcccgctggacctggccgccgagggtcgcgtgctcaaggcccttcagggctgcgcccagcgcttccgggagcggcaggcgggcgggggcgcggccccgggccccaggcaaacgctcgggacccccaacaccgtgacgaacctgcacgtgggcgccgcgccggggcccgaggccgctgagtgcctggtgtgctccgagctggcgctgctggtgctgttctcgccgtgccagcaccgcaccgtgtgtgaggagtgcgcgcgcaggatgaagaagtgcatcaggtgccaggtggtcgtcagcaagaaactgcgcccagacggctctgaggtggcgagcgccgcccccgcccccggcccgccgcgccagctggtggaggagctgcagagccgctaccggcagatggaggaacgcatcacctgccccatctgcatcgacaggcacatccgcctcgtgttccagtgcggccacggcgcatgcgccccctgcggctccgcgctcagcgcctgccccatctgccgccagcccatccgcgaccgcatccagatcttcgtgtgagccgcgccgtccgccgcgcccgagctgccttcgcgtgcccccgccctgtgttttataaaaagaaagattctcggat

SEQ ID NO: 160 - protein, 999 aa, Homo sapiens [sequence omitted]

SEQ ID NO: 161 - DNA, 3168 bp, Homo sapiens
  CDS (93)..(3089)
agtgcccggtggcccaggagggcctgggagcccgaagccgtccccgagtcgctcctaggtcactggcgcgatgcgggccgtcctctcggctgatgggttggaagcccagcgaggctagaggccagtcccaaagtctccaggcatcagggctgcagcccaggagcctcaaggcggcccggcgggcgactggacggccggacaggtcccgagcagccccgcccaacatggacccagacccccaggcgggcgtgcaggtgggcatgcgggtggtgcgcggcgtggactggaagtggggccagcaggacggcggcgagggcggcgtgggcacggtggtggagcttggccgccacggcagcccctcgacacccgaccgcacagtggtcgtgcagtgggaccagggcacgcgcaccaactaccgcgccggctaccagggcgcgcacgacctgctgctgtacgacaacgcccagatcggcgtccggcaccccaacatcatctgtgactgctgcaagaagcacgggctgcgggggatgcgctggaagtgccgtgtgtgcctggactacgacctctgcacgcagtgctacatgcacaacaagcatgagctcgcccacgccttcgaccgctacgagaccgctcactcgcgccctgtcacactgagtccccgccagggcctcccgaggatcccactaaggggcatcttccagggagcgaaggtggtgcgaggccccttctgggagtggggctcacaggatggaggggaagggaaaccgggccgtgtggtggacatccgtggctgggatgtggagacaggccggagtgtggccagcgtgacgtgggctgatggtaccaccaatgtgtaccgtgtgggccacaagggcaaggtggacctcaagtgtgtgggcgaggcagcgggcggcttctactacaaggaccacctcccaaggctcggcaagccggcggagctgcagcgcagggtgagtgctgacagccagcccttccagcacggggacaaggtcaagtgtctgctggacactgatgtcctgcgggagatgcaggaaggccacggcggctggaaccccaggatggcggagtttatcggacagacgggcaccgtgcatcgtatcacggaccgcggggacgtgcgcgtgcagttcaaccacgagacgcgctggaccttccaccccggggcgctcaccaagcaccactccttctgggtgggcgacgtggtccgggtcatcggcgaccttgacacagtgaagcggctgcaggctgggcatggcgagtggacggacgacatggcccctgccctgggccgcgtcgggaaggtggtgaaagtgtttggagacgggaacctgcgtgtagcagtcgctggtcagcggtggaccttcagcccctcctgcctggtggcctaccggcccgaggaggatgccaacctggacgtggccgagcgcgcccgggagaacaaaagctcactgagcgtggccctggacaagcttcgggcccagaagagtgacccagagcacccgggaaggctggtggtggaggtggcgctgggtaacgcagcccgggctctggacctgctgcggaggcgcccagagcaagtggacaccaagaaccaaggcaggaccgctctgcaagtggctgcctacctgggccaggtggagttgatacggctgctgctacaagccagggcgggcgtggacctgccggacgacgagggcaacacggcactgcactacgcggccctggggaaccagcccgaggccaccagggtgctcctgagtgctgggtgccgggcggacgccatcaacagcacccagagcacagcactgcacgtggccgtgcagaggggcttcctggaggtggtgcgggccctgtgtgagcgcggctgtgacgtcaacctgcccgacgcccactcggacacgcccctgcactccgccatctcggcgggcactggagccagcggcattgtcgaggtcctcacggaggtgccaaacatcgatgttaccgccaccaacagccagggtttcaccctgctgcaccatgcctccctcaagggtcacgcgctagctgtgagaaagattctggctcgggcgcggcagctggtggacgccaagaaggaggacggcttcacggcgctgcatctggctgccctcaacaaccaccgcgaggtggcccagatcctcatccgggagggccgctgtgacgtgaacgtgcgcaaccggaagctgcagtccccgctgcatctcgccgtgcaacaggcccacgtggggctggtgccgctactggtggacgctgggtgcagtgtcaacgccgaggacgaggagggggacacagccctgcacgtggcgctgcagcgtcatcagctgctgcccctggtggctgatggggccgggggggacccagggcccttgcagctgctgtccaggctacaggcctcgggcctccccggcagcgcggagctgacggtgggcgcggcggtcgcctgcttcctggcgctggagggcgccgacgtgagctacaccaaccaccgcggtcggagcccgctggacctggccgccgagggtcgcgtgctcaaggcccttcagggctgcgcccagcgcttccgggagcggcaggcgggcgggggcgcggccccgggccccaggcaaacgctcgggacccccaacaccgtgacgaacctgcacgtgggcgccgcgccggggcccgaggccgctgagtgcctggtgtgctccgagctggcgctgctggtgctgttctcgccgtgccagcaccgcaccgtgtgtgaggagtgcgcgcgcaggatgaagaagtgcatcaggtgccaggtggtcgtcagcaagaaactgcgcccagacggctctgaggtggcgagcgccgcccccgcccccggcccgccgcgccagctggtggaggagctgcagagccgctaccggcagatggaggaacgcatcacctgccccatctgcatcgacagccacatccgcctcgtgttccagtgcggccacggcgcatgcgccccctgcggctccgcgctcagcgcctgccccatctgccgccagcccatccgcgaccgcatccagatcttcgtgtgagccgcgccgtccgccgcgcccgagctgccttcgcgtgcccccgccctgtgttttataaaaagaaagattctcggat

SEQ ID NO: 162 - protein, 999 aa, Homo sapiens
MGWKPSEARGQSQSLQASGLQPRSLKAARRATGRPDRSRAAPPNMDPDPQAGVQVGMRVVRGVDWKWGQQDGGEGGVGTVVELGRHGSPSTPDRTVVVQWDQGTRTNYRAGYQGAHDLLLYDNAQIGVRHPNIICDCCKKHGLRGMRWKCRVCLDYDLCTQCYMHNKHELAHAFDRYETAHSRPVTLSPRQGLPRIPLRGIFQGAKVVRGPFWEWGSQDGGEGKPGRVVDIRGWDVETGRSVASVTWADGTTNVYRVGHKGKVDLKCVGEAAGGFYYKDHLPRLGKPAELQRRVSADSQPFQHGDKVKCLLDTDVLREMQEGHGGWNPRMAEFIGQTGTVHRITDRGDVRVQFNHETRWTFHPGALTKHHSFWVGDVVRVIGDLDTVKRLQAGHGEWTDDMAPALGRVGKVVKVFGDGNLRVAVAGQRWTFSPSCLVAYRPEEDANLDVAERARENKSSLSVALDKLRAQKSDPEHPGRLVVEVALGNAARALDLLRRRPEQVDTKNQGRTALQVAAYLGQVELIRLLLQARAGVDLPDDEGNTALHYAALGNQPEATRVLLSAGCRADAINSTQSTALHVAVQRGFLEVVRALCERGCDVNLPDAHSDTPLHSAISAGTGASGIVEVLTEVPNIDVTATNSQGFTLLHHASLKGHALAVRKILARARQLVDAKKEDGFTALHLAALNNHREVAQILIREGRCDVNVRNRKLQSPLHLAVQQAHVGLVPLLVDAGCSVNAEDEEGDTALHVALQRHQLLPLVADGAGGDPGPLQLLSRLQASGLPGSAELTVGAAVACFLALEGADVSYTNHRGRSPLDLAAEGRVLKALQGCAQRFRERQAGGGAAPGPRQTLGTPNTVTNLHVGAAPGPEAAECLVCSELALLVLFSPCQHRTVCEECARRMKKCIRCQVVVSKKLRPDGSEVASAAPAPGPPRQLVEELQSRYRQMEERITCPICIDSHIRLVFQCGHGACAPCGSALSACPICRQPIRDRIQIFV

SEQ ID NO: 163 - DNA, 4031 bp, Homo sapiens
  CDS (91)..(2649)
gttctggtcccggtgagatgctggaagctgctgcggcagccgcaacgcgcccggtcgccgtcccgtcgccaatccccgccgtcccgggccatgatcgcctggcgtctgcccttgtgcgtgctcttggtggcctccgtcgagagccacctgggggccctggggcccaagaacgtctcgcagaaagacgcggagtttgagcgcacctacgcggacgacgtcaacagcgagctggtcaacatctacaccttcaaccacaccgtgacccgcaaccggaccgagggtgtgcgagtgtctgtgaatgtcctgaacaagcagaaaggggcgcctttgctgttcgtggtccgccagaaggaggctgttgtgtccttccaggtgcccctaatccttcgaggactgtatcagcggaagtacctctaccaaaaagtggaacgaactctgtgtcagccccccaccaagaatgagtctgagatccagtttttctatgtggacgtgtctaccctgtcacccgtcaataccacttaccagctccgagtcaaccgtgtggacaattttgtgctcaggactggagagctgtttacctttaataccactgcagcccagccccagtacttcaaatacgagtttcctgatggtgtggactcggtaattgtcaaggtgacctccaagaaggccttcccctgctcagtcatctccatccaggatgtcctgtgccctgtctatgatctggacaacagtgtagccttcattggcatgtaccagacgatgactaagaaggcagccatcactgtgcagcggaaagacttccccagcaacagcttctatgtggtggtggtagtgaagactgaggaccaggcctgcggagggtccttgcccttctacccttttgtggaagatgagccagtggatcaagggcaccgtcagaaaacactgtcagtgctggtctctcaggctgtcacatctgaggcctatgttggtgggatgctcttttgcctgggcatattcttgtccttctacctgctgactgtgctgctggcctgttgggagaactggaggcaaaggaagaagaccttgctggtggccatagaccgagcctgcccagaaagtggtcacgctcgggtcttggctgattcatttcctggcagtgccccttacgagggttacaactatggctcctttgaaaatggttccggatccactgacgggttggttgaaagcgcaggttcaggggacctctcctacagttaccaggggcacgaccagttcaagcggcgccttccctctggccagatgcggcagctgtgcattgccatggaccgctcctttgacgcagtgggtcctcggcctcgactggactccatgagctccgtggaagaggatgactacgacacgctgactgacatcgactcagacaaaaacgtcattcgaaccaagcaatacctctgtgtggctgatctggcacgaaaggacaaacgtgttttgcggaaaaagtaccagatttacttctggaacatagccaccattgcggtcttctacgcacttcctgtggtgcagctggtgatcacctaccagacggtggtgaatgtcacagggaaccaggacatctgctactacaacttcctctgtgcccacccgctgggcaacctcagcgccttcaacaacatcctcagcaacttggggtacatcctgctggggctgctcttcctgctcatcatcctgcagcgagagatcaatcataaccgggccctgctgcggaatgacctctatgctctggagtgtgggatccccaaacactttggtctgttttacgccatgggcacagcactgatgatggaggggctacttagtgcctgttaccacgtctgccccaactacaccaacttccagtttgatacctccttcatgtacatgattgctggcctctgcatgctgaagctctaccagaagcggcacccagatatcaacgccagtgcctacagtgcatatgcctgcttggccatcgtcatcttcttctccgttctgggcgtggtgtttggcaaagggaacacggccttctggattgtcttctccgtcattcacatcatctccaccctgctcctcagcactcagctctattacatgggccgctggaagctggacttcgggatcttccgccgcatcctccatgtgctctacacagactgcatccggcagtgcagcgggcccctttacacggaccgcatggtgcttctggtcatgggcaacattatcaactggtcgctggctgcatacggactcatcatgcgccccaatgactttgcttcctacttgctggcaattggcatctgcaacctgctgctttatttcgccttctacatcatcatgaagctccggagcggcgagaggatcaagctcatccctctgctttgcatcgtctgcacctccgtggtctggggcttcgcgctcttcttcttcttccagggactgagcacgtggcagaaaacccccgcagagtccagggagcacaaccgcgactgcatcctcctcgacttctttgatgaccacgatatctggcacttcctgtcctccattgccatgtttgggtccttcctggttttgctgacgttggatgacgacttggacacagtacagcgggacaagatctatgtcttctagcagcatctgtggtccaggcttcacctcacgggcctagcgcctgcctctgcatcacctgccagttgccacaagaacaccacgggtgtgagtcccagctctgctgcccagcattggatgtcgtggcaagacagcgagattccagcccaggcctgactcaggacagttcctggtggcactgagccttggagttgcctctgcggaggaggaggcctgctccgcattccccagacactggccaaattgctgctttcttctcagtgttgggtcctccccaggaccctagtctgtccatctgtcttgtttatccactggctctccatttgtccctttggagaggaaggtgggaaggcaatgtcctgtcccatttcatgccttgcattctgcccatcccttccctcctctcagcttaggacacacagccctttcttcttcccatgctctgtccaggaccacagtctggtgcctgattctttgtccatcaccaggacctaagctctccctgggtctgtagctggctgctatcactgcccactctgacctgccaggacagatgcaggtaggagactttgggggctggccagctggtgccaggctttcggtgctaaggcctggaaggggcctaggtacgaccctcctccctgacctgtgcttggagctggctcttcagcagtgagggccagcccaagttgagtcttctgatcggggactgaattcagaggccacctcatcccaccagccactagaatgatgccagcactagggttggtgggaagtggcaactcactgtccccttccacaccctcagtcctgccaagccccagatgggggcctctcagtgccattgacactgcccaagaatgtctagaggccacggaacggtgccaagcacacagtcccttttgcctctttcacgggagcaggagtcccagtgcctgtcgtggaaagggaggaacatgccaggtccctgtgtgtccttggccctgtctcaccaaaggactcagggctggtttctgagtttccgtccagtatttagccaagttctgtgttagtcacgtaggcctaagagccttggcgtttacagagtcacccagctctggcccctggccattctggtccttggcgtttacagagtcacccagctccaggcccctggccactttggtacttggttgcccttcacttcaccaggtccattccagatgccaagagtgggccccaggaatgtgtttccttctctccaccatgtttttatagctcttgggctgggagaagaggcgggtctgggtctttgtttctgagctttgttctatgttcctccatgctacggttgcaattgttttctatgaacgagtacattcaataaagacaaccagacctgg

SEQ ID NO: 164 - protein, 853 aa, Homo sapiens
MIAWRLPLCVLLVASVESHLGALGPKNVSQKDAEFERTYADDVNSELVNIYTFNHTVTRNRTEGVRVSVNVLNKQKGAPLLFVVRQKEAVVSFQVPLILRGLYQRKYLYQKVERTLCQPPTKNESEIQFFYVDVSTLSPVNTTYQLRVNRVDNFVLRTGELFTFNTTAAQPQYFKYEFPDGVDSVIVKVTSKKAFPCSVISIQDVLCPVYDLDNSVAFIGMYQTMTKKAAITVQRKDFPSNSFYVVVVVKTEDQACGGSLPFYPFVEDEPVDQGHRQKTLSVLVSQAVTSEAYVGGMLFCLGIFLSFYLLTVLLACWENWRQRKKTLLVAIDRACPESGHARVLADSFPGSAPYEGYNYGSFENGSGSTDGLVESAGSGDLSYSYQGHDQFKRRLPSGQMRQLCIAMDRSFDAVGPRPRLDSMSSVEEDDYDTLTDIDSDKNVIRTKQYLCVADLARKDKRVLRKKYQIYFWNIATIAVFYALPVVQLVITYQTVVNVTGNQDICYYNFLCAHPLGNLSAFNNILSNLGYILLGLLFLLIILQREINHNRALLRNDLYALECGIPKHFGLFYAMGTALMMEGLLSACYHVCPNYTNFQFDTSFMYMIAGLCMLKLYQKRHPDINASAYSAYACLAIVIFFSVLGVVFGKGNTAFWIVFSVIHIISTLLLSTQLYYMGRWKLDFGIFRRILHVLYTDCIRQCSGPLYTDRMVLLVMGNIINWSLAAYGLIMRPNDFASYLLAIGICNLLLYFAFYIIMKLRSGERIKLIPLLCIVCTSVVWGFALFFFFQGLSTWQKTPAESREHNRDCILLDFFDDHDIWHFLSSIAMFGSFLVLLTLDDDLDTVQRDKIYVF

SEQ ID NO: 165 - DNA, 3138 bp, Homo sapiens
  CDS (84)..(2648)
gccgcaacccgtcccggaggtgtcctgtctcctgtcgccgccgccgccgccaccaccgctgccactgccgccctgccggggccatgttcgctctgggcttgcccttcttggtgctcttggtggcctcggtcgagagccatctgggggttctggggcccaagaacgtctcgcagaaagacgccgagtttgagcgcacctacgtggacgaggtcaacagcgagctggtcaacatctacaccttcaaccatactgtgacccgcaacaggacagagggcgtgcgtgtgtctgtgaacgtcctgaacaagcagaagggggcgccgttgctgtttgtggtccgccagaaggaggctgtggtgtccttccaggtgcccctaatcctgcgagggatgtttcagcgcaagtacctctaccaaaaagtggaacgaaccctgtgtcagccccccaccaagaatgagtcggagattcagttcttctacgtggatgtgtccaccctgtcaccagtcaacaccacataccagctccgggtcagccgcatggacgattttgtgctcaggactggggagcagttcagcttcaataccacagcagcacagccccagtacttcaagtatgagttccctgaaggcgtggactcggtaattgtcaaggtgacctccaacaaggccttcccctgctcagtcatctccattcaggatgtgctgtgtcctgtctatgacctggacaacaacgtagccttcatcggcatgtaccagacgatgaccaagaaggcggccatcaccgtacagcgcaaagacttccccagcaacagcttttatgtggtggtggtggtgaagaccgaagaccaagcctgcgggggctccctgcctttctaccccttcgcagaagatgaaccggtcgatcaagggcaccgccagaaaaccctgtcagtgctggtgtctcaagcagtcacgtctgaggcatacgtcagtgggatgctcttttgcctgggtatatttctctccttttacctgctgaccgtcctcctggcctgctgggagaactggaggcagaagaagaagaccctgctggtggccattgaccgagcctgcccagaaagcggtcaccctcgagtcctggctgattcttttcctggcagttccccttatgagggttacaactatggctcctttgagaatgtttctggatctaccgatggtctggttgacagcgctggcactggggacctctcttacggttaccaggggcacgaccagttcaagcggcgcctcccctctggccagatgcggcagctgtgcattgccatgggccgctcctttgaacctgtaggtactcggccccgagtggactccatgagctctgtggaggaggatgactacgacacattgaccgacatcgattccgacaagaatgtcattcgcaccaagcaatacctctatgtggctgacctggcacggaaggacaagcgtgttctgcggaaaaagtaccagatctacttctggaacattgccaccattgctgtcttctatgcccttcctgtggtgcagctggtgatcacctaccagacggtggtgaatgtcacagggaatcaggacatctgctactacaacttcctctgcgcccacccactgggcaatctcagcgccttcaacaacatcctcagcaacctggggtacatcctgctggggctgcttttcctgctcatcatcctgcaacgggagatcaaccacaaccgggccctgctgcgcaatgacctctgtgccctggaatgtgggatccccaaacactttgggcttttctacgccatgggcacagccctgatgatggaggggctgctcagtgcttgctatcatgtgtgccccaactataccaatttccagtttgacacatcgttcatgtacatgatcgccggactctgcatgctgaagctctaccagaagcggcacccggacatcaacgccagcgcctacagtgcctacgcctgcctggccattgtcatcttcttctctgtgctgggcgtggtctttggcaaagggaacacggcgttctggatcgtcttctccatcattcacatcatcgccaccctgctcctcagcacgcagctctattacatgggccggtggaaactggactcggggatcttccgccgcatcctccacgtgctctacacagactgcatccggcagtgcagcgggccgctctacgtggaccgcatggtgctgctggtcatgggcaacgtcatcaactggtcgctggctgcctatgggcttatcatgcgccccaatgatttcgcttcctacttgttggccattggcatctgcaacctgctcctttacttcgccttctacatcatcatgaagctccggagtggggagaggatcaagctcatccccctgctctgcatcgtttgcacctccgtggtctggggcttcgcgctcttcttcttcttccagggactcagcacctggcagaaaacccctgcagagtcgagggagcacaaccgggactgcatcctcctcgacttctttgacgaccacgacatctggcacttcctctcctccatcgccatgttcgggtccttcctggtaagcgggcctcccggccgagccgggtgggtacgtgaaggtagcagctgcctccttccctgtggctgatctggcgtccacaccccaggtgttgctgacactggatgacgacctggatacttagaaaggggcttcaggaagggatgtgctgtttccctctacgtgcccagtcctagcctcgctctaggacccagggctggcttctaagtttccgtccagtcttcaggcaagttctgtgttagtcatgcacacacatacctatgaaaccttggagtttacaaagaattgccccagctctgggcaccctggccaccctggtccttggatccccttcgtcccacctggtccaccccagatgctgaggatgggggagctcaggcggggcctctgctttggggatgggaatgtgtttttctcccaaacttgtttttatagctctgcttgaagggctgggagatgaggtgggtctggatcttttctcagagcgtctccatgctatggttgcatttccgttttctatgaatgaatttgcattcaataaacaaccagactcagt

SEQ ID NO: 166 - protein, 855 aa, Homo sapiens
MFALGLPFLVLLVASVESHLGVLGPKNVSQKDAEFERTYVDEVNSELVNIYTFNHTVTRNRTEGVRVSVNVLNKQKGAPLLFVVRQKEAVVSFQVPLILRGMFQRKYLYQKVERTLCQPPTKNESEIQFFYVDVSTLSPVNTTYQLRVSRMDDFVLRTGEQFSFNTTAAQPQYFKYEFPEGVDSVIVKVTSNKAFPCSVISIQDVLCPVYDLDNNVAFIGMYQTMTKKAAITVQRKDFPSNSFYVVVVVKTEDQACGGSLPFYPFAEDEPVDQGHRQKTLSVLVSQAVTSEAYVSGMLFCLGIFLSFYLLTVLLACWENWRQKKKTLLVAIDRACPESGHPRVLADSFPGSSPYEGYNYGSFENVSGSTDGLVDSAGTGDLSYGYQGHDQFKRRLPSGQMRQLCIAMGRSFEPVGTRPRVDSMSSVEEDDYDTLTDIDSDKNVIRTKQYLYVADLARKDKRVLRKKYQIYFWNIATIAVFYALPVVQLVITYQTVVNVTGNQDICYYNFLCAHPLGNLSAFNNILSNLGYILLGLLFLLIILQREINHNRALLRNDLCALECGIPKHFGLFYAMGTALMMEGLLSACYHVCPNYTNFQFDTSFMYMIAGLCMLKLYQKRHPDINASAYSAYACLAIVIFFSVLGVVFGKGNTAFWIVFSIIHIIATLLLSTQLYYMGRWKLDSGIFRRILHVLYTDCIRQCSGPLYVDRMVLLVMGNVINWSLAAYGLIMRPNDFASYLLAIGICNLLLYFAFYIIMKLRSGERIKLIPLLCIVCTSVVWGFALFFFFQGLSTWQKTPAESREHNRDCILLDFFDDHDIWHFLSSIAMFGSFLVSGPPGRAGWVREGSSCLLPCG

SEQ ID NO: 167 - DNA, 2815 bp, Homo sapiens
  CDS (56)..(571)
gcgaagcgcgcctgcgacccggcgtccgggcgcgctggagaggacgcgaggagccatgaggcgccagcctgcgaaggtggcggcgctgctgctcgggctgctcttggagtgcacagaagccaaaaagcattgctggtatttcgaaggactctatccaacctattatatatgccgctcctacgaggactgctgtggctccaggtgctgtgtgcgggccctctccatacagaggctgtggtacttctggttccttctgatgatgggcgtgcttttctgctgcggagccggcttcttcatccggaggcgcatgtaccccccgccgctgatcgaggagccagccttcaatgtgtcctacaccaggcagcccccaaatcccggcccaggagcccagcagccggggccgccctattacaccgacccaggaggaccggggatgaaccctgtcgggaattccatggcaatggctttccaggtcccacccaactcaccccaggggagtgtggcctgcccgccccctccagcctactgcaacacgcctccgcccccgtacgaacaggtagtgaaggccaagtagtggggtgcccacgtgcaagaggagggacaggagagggcctttccctggcctttctgtcttcgttgatgttcacttccaggaacggtctcgtgggctgctaagggcagttcctctgatatcctcacagcaagcacagctctctttcaggctttccatggagtacaatatatgaactcacactttgtctcctctgttgcttctgtttctgacgcagtctgtgctctcacatggtagtgtggtgacagtccccgagggctgacgtccttacggtggcgtgaccagatctacgggagagagactgagaggaagaaggcagtgctggaggtgcaggtggcatgtagaggggccaggccgagcatcccaggcaagcatccttctgcccgggtattaataggaagccccatgccgggcggctcagccgatgaagcagcagccgactgagctgagcccagcaggtcatctgctccagcctgtcctctcgtcagccttcctcttccagaagctgttggagagacattcaggagagagcaagccccttgtcatgtttctgtctctgttcatatcctaaagatagacttctcctgcaccgccagggaagggtagcacgtgcagctctcaccgcaggatggggcctagaatcaggcttgccttggaggcctgacagtgatctgacatccactaagcaaatttatttaaattcatgggaaatcacttcctgccccaaactgagacattgcattttgtgagctcttggtctgatttggagaaaggactgttacccatttttttggtgtgtttatggaagtgcatgtagagcgtcctgccctttgaaatcagactgggtgtgtgtcttccctggacatcactgcctctccagggcattctcaggcccgggggtctccttccctcaggcagctccagtggtgggttctgaagggtgctttcaaaacggggcacatctggctgggaagtcacatggactcttccagggagagagaccagctgaggcgtctctctctgaggttgtgttgggtctaagcgggtgtgtgctgggctccaaggaggaggagcttgctggggaaagacaggagaagtactgactcaactgcactgaccatgttgtcataattagaataaagaagaagtggtcggaaatgcacattcctggataggaatcacagctcaccccaggatctcacaggtagtctcctgagtagttgacggctagcggggagctagttccgccgcatagttatagtgttgatgtgtgaacgctgacctgtcctgtgtgctaagagctatgcagcttagctgaggcgcctagattactagatgtgctgtatcacggggaatgaggtgggggtgcttattttttaatgaactaatcagagcctcttgagaaattgttactcattgaactggagcatcaagacatctcatggaagtggatacggagtgatttggtgtccatgcttttcactctgaggacatttaatcggagaacctcctggggaattttgtgggagacacttgggaacaaaacagacaccctgggaatgcagttgcaagcacagatgctgccaccagtgtctctgaccaccctggtgtgactgctgactgccagcgtggtacctcccatgctgcaggcctccatctaaatgagacaacaaagcacaatgttcactgtttacaaccaagacaactgcgtgggtccaaacactcctcttcctccaggtcatttgttttgcatttttaatgtctttattttttgtaatgaaaaagcacactaagctgcccctggaatcgggtgcagctgaataggcacccaaaagtccgtgactaaatttcgtttgtctttttgatagcaaattatgttaagagacagtgatggctagggctcaacaattttgtattcccatgtttgtgtgagacagagtttgttttcccttgaacttggttagaattgtgctactgtgaacgctgatcctgcatatggaagttccgcttcggtgacatttcctggccattcttgtttccattgtgtggatggtgggttgtgcccacttcctggagtgagacagctcctggtgtgtagaattcccggagcgtccgtggttcagagtaaacttgaagcagatctgtgcatgcttttcctctgcaacaattggctcgtttctcttttttgttctcttttgataggatcctgtttcctatgtgtgcaaaataaaaataaatttgggc

SEQ ID NO: 168 - protein, 172 aa, Homo sapiens
MRRQPAKVAALLLGLLLECTEAKKHCWYFEGLYPTYYICRSYEDCCGSRCCVRALSIQRLWYFWFLLMMGVLFCCGAGFFIRRRMYPPPLIEEPAFNVSYTRQPPNPGPGAQQPGPPYYTDPGGPGMNPVGNSMAMAFQVPPNSPQGSVACPPPPAYCNTPPPPYEQVVKAK

SEQ ID NO: 169 - DNA, 3337 bp, Homo sapiens
  CDS (136)..(1755)
tctcgctgcgggaagggtcctgggccccgggcggcggtcgccaggtctcagggccgggggtacccgagtctcgtttcctctcagtccatccacccttcatggggccagagccctctctccagaatctgagcagcaatgccgtttgctgaagacaagacctataagtatatctgccgcaatttcagcaatttttgcaatgtggatgttgtagagattctgccttacctgccctgcctcacagcaagagaccaggatcgactgcgggccacctgcacactctcagggaaccgggacaccctctggcatctcttcaatacccttcagcggcggcccggctgggtggagtacttcattgcggcactgaggggctgtgagctagttgatctcgcggacgaagtggcctctgtctaccagagctaccagcctcggacctcggaccgtcccccagacccactggagccaccgtcacttcctgctgagaggccagggccccccacacctgctgcggcccacagcatcccctacaacagctgcagagagaaggagccaagttaccccatgcctgtccaggagacccaggcgccagagtccccaggagagaattcagagcaagccctgcagacgctcagccccagagccatcccaaggaatccagatggtggccccctggagtcctcctctgacctggcagccctcagccctctgacctccagcgggcatcaggagcaggacacagaactgggcagtacccacacagcaggtgcgacctccagcctcacaccatcccgtgggcctgtgtctccatctgtctccttccagcccctggcccgttccacccccagggcaagccgcttgcctggacccacagggtcagttgtatctactggcacctccttctcctcctcatcccctggcttggcctctgcaggggctgcagagggtaaacagggtgcagagagtgaccaggccgagcctatcatctgctccagtggggcagaggcacctgccaactctctgccctccaaagtgcctaccaccttgatgcctgtgaacacagtggccctgaaagtgcctgccaacccagcatctgtcagcacagtgccctccaagttgccaactagctcaaagccccctggtgcagtgccttctaatgcgctcaccaatccagcaccatccaaattgcccatcaactcaacccgtgctggcatggtgccatccaaagtgcctactagcatggtgctcaccaaggtgtctgccagcacagtccccactgacgggagcagcagaaatgaggagaccccagcagctccaacacccgccggcgccactggaggcagctcagcctggctagacagcagctctgagaataggggccttgggtcggagctgagtaagcctggcgtgctggcatcccaggtagacagcccgttctcgggctgcttcgaggatcttgccatcagtgccagcacctccttgggcatggggccctgccatggcccagaggagaatgagtataagtccgagggcacctttgggatccacgtggctgagaaccccagcatccagctcctggagggcaaccctgggccacctgcggacccggatggcggccccaggccacaagccgaccggaagttccaggagagggaggtgccatgccacaggccctcacctggggctctgtggctccaggtggctgtgacaggggtgctggtagtcacactcctggtggtgctgtaccggcggcgtctgcactagtgaagccctgggctcttcccaccacccatctgttccgttcctgcagtatacctggcccctctccgaagcccctctttccctcccctctggtctccattctcttcagctccctacatgggctggggaggagacacctggtgggcagagctcaggcagaggtttggatttcagctccctcacttccggggctgtgtggctttggcagatgtcagacttctggtcttgcttctccacgtggacagtgagtatctggctcattcttcactgggttcttctgagattgaacctacaggtgtttgccaagtgcctggcccagagcaagtggccactgcttctcccatctctctcctgcccaacctggtagagctgagggcatgagaggcagagtgcacagtggtcaagggtgcagctctgcggcacaggcagcctaggcctgcgtcccaacctgcctctcaccagctctgtgaccttgggcaagggatttatctgtctgtcccttagttttctcacctgtaaaaggaggataagtatatatatatatttcccagtgttgtgaagattaaaggagtttatcgatgtaggtcttaggatgagtcctggcatttaccaagggttggatatatgttattatcactattaagtgttgagggtccaggcatgctgggcaacagggaccccatctctacaaaaaagtttaaaaaattagccaggcgtggtggtgcacctgtcgtcttagctacttgggaggctgaggtgggaggatcgcttgagcccggaagcttgaagctgcagtgagctaggatcgtgccactgcactccaacctgggtgagagagcgagaccctgtctcaagaaaaagaaaaatgcagagaaacaggagtcttggctactcctttagaggcagactcagaccctcctgcctcacagctttatctttgtatttgccccttactttatcttgtgccttgagaaattgctggggagagaggtatgtccactgggcagctgtacaggatggaggatatagggcgtttccactcccagcagccaggttccctcaccccaagctcacccactgttggggagattatctacaataacaccagaaacacattggggtggattgggggtatccttatgggttcttttcagggaaccattgctggacaaggcacaggagccacctccatttctgagctctgcaagggacaagaactagagccatcaggggctgggctcactgtggccccaccccaagccgtcagcctccagggatctacaccctgccttggctgctacagctttttcactccactgccctaggggagttcagcaacctaatgatctctatctctgaacatctcttcatcccatgctccaagtccagcaacctgcaccctggaaccaggagtggaccctacccgggctgtctgtattaatccccatcccccaccaccaatcttaaaaagccctctgtccccctaccctaaaccccagttaggtacccatgctgggcaggtcagttaacaatttatgcacaggtactagttttattgtattaccgttccagggtagctttg

SEQ ID NO: 170 - protein, 540 aa, Homo sapiens
MPFAEDKTYKYICRNFSNFCNVDVVEILPYLPCLTARDQDRLRATCTLSGNRDTLWHLFNTLQRRPGWVEYFIAALRGCELVDLADEVASVYQSYQPRTSDRPPDPLEPPSLPAERPGPPTPAAAHSIPYNSCREKEPSYPMPVQETQAPESPGENSEQALQTLSPRAIPRNPDGGPLESSSDLAALSPLTSSGHQEQDTELGSTHTAGATSSLTPSRGPVSPSVSFQPLARSTPRASRLPGPTGSVVSTGTSFSSSSPGLASAGAAEGKQGAESDQAEPIICSSGAEAPANSLPSKVPTTLMPVNTVALKVPANPASVSTVPSKLPTSSKPPGAVPSNALTNPAPSKLPINSTRAGMVPSKVPTSMVLTKVSASTVPTDGSSRNEETPAAPTPAGATGGSSAWLDSSSENRGLGSELSKPGVLASQVDSPFSGCFEDLAISASTSLGMGPCHGPEENEYKSEGTFGIHVAENPSIQLLEGNPGPPADPDGGPRPQADRKFQEREVPCHRPSPGALWLQVAVTGVLVVTLLVVLYRRRLH

SEQ ID NO: 171 - DNA, 3579 bp, Homo sapiens
  CDS (242)..(3094)
gtagtttcggctcggcagacccggcgagcccagtggccgcgctccggtgcggcggcgcccgaggcccgaggcggaagtgggacggccaagcagggaagcgagggctcgggatcgacggccgcggggcgccgacgaggagtgcaggactcaggaagggcgagtgcgcggcgacagagcccggggaaggaggcagggcaaggccgggcttgggggcaggtggtccgggcatccagccttgaagatgcacaagaggaaaggacccccgggacccccgggcagaggcgccgcggccgcccgccagctgggcctgctggttgacctctccccagatggcctgatgatccctgaggacggggctaacgatgaagaactggaggctgagttcttggctttggtcgggggccagcccccagccctggagaagctcaaaggcaaaggtcccttgccgatggaggccattgagaagatggccagcctgtgcatgagagacccggatgaggatgaggaggaggggacggatgaggacgacttggaggctgatgatgacctgctggcggagctaaatgaggtccttggagaggagcagaaggcttcagagaccccacctcctgtggcccagccgaagcctgaggcccctcatccggggctggagaccaccttgcaggagaggctggcgctctatcagacagcaattgaaagcgccagacaagctggagacagcgccaagatgcggcgctacgatcgggggcttaaaacactggaaaacctgctcgcctccatccgtaagggcaatgccattgacgaagcggacatcccgccgccagtggccataggaaaaggcccggcgtccacgcctacctacagccctgcacccacccagccggcccctagaatcgcgtcagccccagagcccagggtcaccctggagggaccttctgccaccgccccagcctcatctccaggcttggctaagccccagatgcccccaggtccctgcagccctggccctctggcccagttgcagagccgccagcgcgactacaagctggctgccctccacgccaagcagcagggagataccactgctgccgctagacacttccgcgtggctaagagctttgatgctgtcttggaggccctgagccggggtgagcccgtggacctctcctgcctgccccctccacccgaccagctgcccccagacccaccgtcaccaccgtcgcagcctccgacccccgctacggcgccctccacaacagaggtgcccccacccccgaggaccctgctggaggcgctggagcagcggatggagcggtaccaggtggccgcagcccaggccaagagcaagggggaccagcggaaagctcgaatgcacgagcgcatcgtcaagcaataccaagatgccatccgagcccacaaggctggccgagccgtggatgtcgctgaattgcccgtgcccccaggcttccccccaatccagggcctggaggccaccaagcccacccagcagagtctggtgggtgtcctggagactgccatgaagctggccaaccaggatgaaggcccagaggatgaagaggatgaggtgcctaagaagcagaacagccctgtggcccccacagcccagcccaaagccccaccctcaagaactccccagtcgggatcagccccaacagccaaagcgccccccaaagccacatccaccagagcccagcagcagctggccttcctagagggccgcaagaagcagctcctgcaggccgcactgcgagccaagcagaaaaacgacgtggagggtgccaagatgcacctgcgccaagccaagggactggagcctatgctggaggcctcgcgcaatgggctgcctgtggacatcaccaaggtgccgcctgcccctgtcaacaaggacgactttgccctggtccagcggcctggcccgggtctgtctcaggaggccgcccggcgctatggtgaactcaccaagctcatacggcagcagcacgagatgtgcctgaaccactcaaaccaattcacccagctgggcaacatcactgaaaccaccaagtttgaaaagttggcggaggactgtaagcggagcatggacattctgaagcaagccttcgtccggggtctccccacgcccaccgcccgctttgagcaaaggaccttcagcgtcatcaagatcttccctgacctcagcagcaacgacatgctcctcttcatcgtgaagggcatcaacttgcccacacccccaggactgtcccctggcgatctggatgtctttgttcggtttgacttcccctatcccaacgtggaagaagctcagaaagacaagaccagtgtgatcaagaacacagactcccctgagttcaaggagcagttcaaactctgcatcaaccgcagccaccgtggcttccgaagggccatccagaccaagggcatcaagttcgaagtggttcacaagggggggctgttcaagactgaccgggtgctggggacagcccagctgaagctggatgcactggagatagcatgtgaggtccgggagatccttgaggtcctggatggtcgccggcccacaggggggcgactggaggtaatggtccggattcgggagccactgacagcccagcagttggagacgacgacagagaggtggctggtcattgaccctgtgccggcagctgtgcccacacaggttgctgggcccaaagggaaggcccctcctgtgcctgcccctgcaagggagtcagggaacagatcagcccggcccctgcatagcctcagtgtgctggcgtttgaccaagagcgtctggagcggaagatcctggccctcaggcaggcgcggcggccggtgcccccagaagtggcccagcagtaccaggacatcatgcaacgcagccagtggcagagggcacagctggagcaggggggtgtgggcatccgacgggaatacacagcccagctggagcggcagctgcagttctacacggaggctgcccggcgcctgggcaacgatggcagcagggatgctgcaaaggaggcgctctataggcggaatctggtagggagtgagctgcagcggctccgcaggtgaggagcccatggggcgggcagcccccagaaagcgggcagcaggccccgataccgggaagagccgacacagccacgaaccagacaagcagacaatcagcggacaatcggttctggactcacccctcatccgggcccccagccccgccagagcctccgtggctgcgggtgttgggaaccatgcctgccagccagtatgtgcccctcacccaggcctggctgggccctggagagtcctgtttgcacagcccaggggtgtccggcctctggcccgccccggagcagggagggcggctggggccaagccccgagggcccctgcaagcactttacttcctgttcctccccagccttaaccccaaagccctcctgcaccccaaagaagccactgaggctggccgagccacactgtctccccaggggcgtcgacctggcccagctgggtccccaggccagcacatggaataaaatagccagggccacactc

SEQ ID NO: 172 - protein, 951 aa, Homo sapiens
MHKRKGPPGPPGRGAAAARQLGLLVDLSPDGLMIPEDGANDEELEAEFLALVGGQPPALEKLKGKGPLPMEAIEKMASLCMRDPDEDEEEGTDEDDLEADDDLLAELNEVLGEEQKASETPPPVAQPKPEAPHPGLETTLQERLALYQTAIESARQAGDSAKMRRYDRGLKTLENLLASIRKGNAIDEADIPPPVAIGKGPASTPTYSPAPTQPAPRIASAPEPRVTLEGPSATAPASSPGLAKPQMPPGPCSPGPLAQLQSRQRDYKLAALHAKQQGDTTAAARHFRVAKSFDAVLEALSRGEPVDLSCLPPPPDQLPPDPPSPPSQPPTPATAPSTTEVPPPPRTLLEALEQRMERYQVAAAQAKSKGDQRKARMHERIVKQYQDAIRAHKAGRAVDVAELPVPPGFPPIQGLEATKPTQQSLVGVLETAMKLANQDEGPEDEEDEVPKKQNSPVAPTAQPKAPPSRTPQSGSAPTAKAPPKATSTRAQQQLAFLEGRKKQLLQAALRAKQKNDVEGAKMHLRQAKGLEPMLEASRNGLPVDITKVPPAPVNKDDFALVQRPGPGLSQEAARRYGELTKLIRQQHEMCLNHSNQFTQLGNITETTKFEKLAEDCKRSMDILKQAFVRGLPTPTARFEQRTFSVIKIFPDLSSNDMLLFIVKGINLPTPPGLSPGDLDVFVRFDFPYPNVEEAQKDKTSVIKNTDSPEFKEQFKLCINRSHRGFRRAIQTKGIKFEVVHKGGLFKTDRVLGTAQLKLDALEIACEVREILEVLDGRRPTGGRLEVMVRIREPLTAQQLETTTERWLVIDPVPAAVPTQVAGPKGKAPPVPAPARESGNRSARPLHSLSVLAFDQERLERKILALRQARRPVPPEVAQQYQDIMQRSQWQRAQLEQGGVGIRREYTAQLERQLQFYTEAARRLGNDGSRDAAKEALYRRNLVGSELQRLRR

SEQ ID NO: 173 - DNA, 2796 bp, Homo sapiens
  CDS (574)..(1683)
aagcatttcctattgagacccccaagagttcccccggcggccctcggctccagcaagactttgggccttttcttgtgtcctgtttgttaaaggcatgcgggctccagcattaaagagggctagtccttaacaaagggaaagcgataaatgtaaataagctcacattttcagaatgagcggtttgcagtaaggagctgcggcagcccagagtctgctctttttgggctgggctaacctttccctgttttttgttttttgttttgttttgtttttgttttttatggataaaaatatgcgcttccgaagtgcgagttgccagtttacacgtttattagctaactatctacaggcatgagcacattctctcatctagcacactctttcttgggcactcaattgaggaactctctgatcgtctgcctccagaaaattcattgattatccaagtctcagataaatctggtgccagagtttggtttgaactaactaatgaagaaagcattctctactggtcctcagtctcaagagtggtgaacccctgcacctagcaggctctctgggaaaaaaaaatccatgggtgacagaagatttattgacttccaattccaagatttaaattcaagtctcagacccaggttgggaaatgcaactgccaataatacttgcattgttgatgattccttcaagtataatttgaatggtgctgtctatagtgttgtattcatcctgggtctaataaccaacagtgcctccctgtttgtcttctgcttccgcatgaaaatgagaagtgagacggctactttcatcaccaacctggccctctctgatttgctttttgtttgtaccctacctttcaaaatattttacaactttaatcgccactggccttttggtgacaccctctgtaagatctcagggactgcgttcctcaccaacatctatgggagcatgctcttcctcacctgcatcagtgtggatcgtttcctagccattgtctatcccttccgatcgcgtaccatcaggaccaggaggaattccgccattgtgtgcgctggagtctggatcctagtcctcagtggtggtatttcagcttctttgttctccaccactaatgtcaacaatgcgaccaccacttgctttgaaggcttctccaaacgtgtctggaagacatacctgtccaagatcactatattcattgaagttgttggattcatcattcctctgatattgaatgtttcttgttcttctgtggtgcttagaaccctccgcaagcctgcaacattgtctcagattgggaccaataagaaaaaagtgttgaagatgatcacagtgcatatggcagtgtttgtggtatgctttgtaccatacaactccgttctctttttatatgccttggtacgctcccaagccattactaattgcttattggaaaggtttgcaaagatcatgtacccaattaccttgtgccttgcaactctgaattgttgctttgatccttttatctattacttcactcttgaatcctttcagaagtccttttatatcaatacacatataaggatggagtcgctgtttaagactgagacacctctgacccccaaaccttcccttccagctatccaagaggaagttagtgatcaaacaacaaataatggtggtgaattaatgctggaatccaccttctaggtaccagaattgtctttcaggttcagctacagtgtctcttatgatttttttcctatgctataaataggagaaacaaattgaagctaatgatactgagaatagagtaatgtaccaaatgcagtcagatacatttgtttgaacactattgtacatattctgttttgttcagtaattataggtcaagtctaattacaacaaccaaaacagatcagcctcttctgttgagttgacttttcattacctaaatgaccagtggtcttgacttttagtgatgtgagggttatttttaaacttaaaaaaaaaggcattccagtaattttggtaattgggttgggcctataaatatagaacaaattcagggattatttaaaaacatctgtgttactactgatatatgctagtatttttttccttttttgaattaatattgaatttattttaaaaaaagaactatttttacctaatcttaataagacatactgagaaagagaaatgtgttgaattttaaaatattggcaaattttacctagattttaaaaacctaaatgaagtgtttgaatgaatatgggtgggaaatttggaatttagacaacatttacgcatttataataaccacaattagtgtcagcttttaaaactttctttttaaaataattctagaattttcatatgaaattgttaatcctgaaaggtgctacttatgtgcctggcaggtataaaatggaaaactcataaaattaacagtgtcaatttaaaaaaaaaaaaactttaagcaacactatattatttcttaagattttcatttatcctttatgggggtggggattggcttgtagaaaatatttattcttcatgttaaatgttggggacacattacagccagagagctacagtatttgtgcccaggtcaggagtaaattgaaaaagtaagtgaatagaatagtagcagcaagatatcttagagcttatattagtagtttttaaggtggtggttagatagctgtaattttgaaatccatactctcttctgtacattttggagcacattgtagccaaggcgctgctgaatttgtgctcaggtcgggagcatattgaaaaagatgtgtacat

SEQ ID NO: 174 - protein, 370 aa, Homo sapiens
MGDRRFIDFQFQDLNSSLRPRLGNATANNTCIVDDSFKYNLNGAVYSVVFILGLITNSASLFVFCFRMKMRSETATFITNLALSDLLFVCTLPFKIFYNFNRHWPFGDTLCKISGTAFLTNIYGSMLFLTCISVDRFLAIVYPFRSRTIRTRRNSAIVCAGVWILVLSGGISASLFSTTNVNNATTTCFEGFSKRVWKTYLSKITIFIEVVGFIIPLILNVSCSSVVLRTLRKPATLSQIGTNKKKVLKMITVHMAVFVVCFVPYNSVLFLYALVRSQAITNCLLERFAKIMYPITLCLATLNCCFDPFIYYFTLESFQKSFYINTHIRMESLFKTETPLTPKPSLPAIQEEVSDQTTNNGGELMLESTF

SEQ ID NO: 175 - DNA, 2299 bp, Homo sapiens
  CDS (67)..(1176)
cctaccggtccatagtgtcagagtggtgaacccctgcagccagcaggcctcctgaaaaaaaagtccatgggtgacagaagattcattgacttccaattccaagattcaaattcaagcctcagacccaggttgggcaatgctactgccaataatacttgcattgttgatgattccttcaagtataatctcaatggtgctgtctacagtgttgtattcatcttgggtctgataaccaacagtgtctctctgtttgtcttctgtttccgcatgaaaatgagaagtgagactgctatttttatcaccaatctagctgtctctgatttgctttttgtctgtacactaccttttaaaatattttacaacttcaaccgccactggccttttggtgacaccctctgcaagatctctggaactgcattccttaccaacatctatgggagcatgctctttctcacctgtattagtgtggatcgtttcctggccattgtctatccttttcgatctcgtactattaggactaggaggaattctgccattgtgtgtgctggtgtctggatcctagtcctcagtggcggtatttcagcctctttgttttccaccactaatgtcaacaatgcaaccaccacctgctttgaaggcttctccaaacgtgtctggaagacttatttatccaagatcacaatatttattgaagttgttgggtttatcattcctctaatattgaatgtctcttgctcttctgtggtgctgagaactcttcgcaagcctgctactctgtctcaaattgggaccaataagaaaaaagtactgaaaatgatcacagtacatatggcagtctttgtggtatgctttgtaccctacaactctgtcctcttcttgtatgccctggtgcgctcccaagctattactaattgctttttggaaagatttgcaaagatcatgtacccaatcaccttgtgccttgcaactctgaactgttgttttgaccctttcatctattacttcacccttgaatcctttcagaagtccttctacatcaatgcccacatcagaatggagtccctgtttaagactgaaacacctttgaccacaaagccttcccttccagctattcaagaggaagtgagtgatcaaacaacaaataatggtggtgaattaatgctagaatccaccttttaggtatgagaaatgtgttcaggtccagatatggtttctcctataatttttcctatgctataaactaaagatttgaagctaatgatactgagaataatgcaccaaatccagtcagatacatttgtttgaaggtatactgtagagtttttattgctgttttgttcagtaattataggtcaaatctaattacaacaaccaagatggattgccaaactcttctgcttggttggaatttcattgtatcgcattatccaggtggctagtggcatttgataatatagagatgactttgaaactttcaaaaaggtatttctattccaatgatatttggtaattaggttgggcctataaatatagaacaaattcagggatttttaaaaaattgtgttactactgatatatgctagttttattttatttttttggactgtcattgagtttattttagcacaagaatatttttagcctaacattattaataagaaatgtgtcaaatttttaacattggtaaaatatgttatgtgcattttgaaaacagaaaacaaattgcgttggcatgtacgtgggtgggaagaaaaagaaaattaacaggatttacacaattataatcaccagcagtgtgagtttaaaaaacttcgttgtttttacaccaaattaaaattttcatgtcaaacttcaaagccagaaagctgctaaatacgtgtctggcaggtaaaagctggaaaattacttaaaacaggaaagtgtcaataaaaaaacttgagcaacaccaacatattttttcttaaaatgtcacgttatcttcattttgggaaactaggttctataaaatatttatcctccctgttatactttggagcacagcacagccagaaaggggctgcatttgtgcccaggtcaggagcaaattgaaaaaaaaaataaagtaatactaaaaaatcaaactataaacccaaaacatttattaaaacctgaattaatcctttttggagggaggagtagagatatataacctgaaaatacttattctttcttatcgaattttggagcctaatatagccaggagctgctgaatttgtgcccctggattggaaccaaataaaaaaaaaaaaaaaaaattcct

SEQ ID NO: 176 - protein, 370 aa, Homo sapiens
MGDRRFIDFQFQDSNSSLRPRLGNATANNTCIVDDSFKYNLNGAVYSVVFILGLITNSVSLFVFCFRMKMRSETAIFITNLAVSDLLFVCTLPFKIFYNFNRHWPFGDTLCKISGTAFLTNIYGSMLFLTCISVDRFLAIVYPFRSRTIRTRRNSAIVCAGVWILVLSGGISASLFSTTNVNNATTTCFEGFSKRVWKTYLSKITIFIEVVGFIIPLILNVSCSSVVLRTLRKPATLSQIGTNKKKVLKMITVHMAVFVVCFVPYNSVLFLYALVRSQAITNCFLERFAKIMYPITLCLATLNCCFDPFIYYFTLESFQKSFYINAHIRMESLFKTETPLTTKPSLPAIQEEVSDQTTNNGGELMLESTF

SEQ ID NO: 177 - DNA, 973 bp, Homo sapiens
  CDS (30)..(416)
cagacagcggcgggcgcaggacgtgcactatggctcggggctcgctgcgccggttgctgcggctcctcgtgctggggctctggctggcgttgctgcgctccgtggccggggagcaagcgccaggcaccgccccctgctcccgcggcagctcctggagcgcggacctggacaagtgcatggactgcgcgtcttgcagggcgcgaccgcacagcgacttctgcctgggctgcgctgcagcacctcctgcccccttccggctgctttggcccatccttgggggcgctctgagcctgaccttcgtgctggggctgctttctggctttttggtctggagacgatgccgcaggagagagaagttcaccacccccatagaggagaccggcggagagggctgcccagctgtggcgctgatccagtgacaatgtgccccctgccagccggggctcgcccactcatcattcattcatccattctagagccagtctctgcctcccagacgcggcgggagccaagctcctccaaccacaaggggggtggggggcggtgaatcacctccgaggcctgggtccagggttcaggggaaccttccaaggtgtctggttgccctgcctctggctccagaacagaaagggagcctcacgctggctcacacaaaacagctgacactgactaaggaactgcagcatttgcacaggggaggggggtgccctccttcctagaggccctgggggccaggctgacttggggggcagacttgacactaggccccactcactcagatgtcctgaaattccaccacgggggtcaccctggggggttagggacctatttttaacactagggggctggcccactaggagggctggccctaagatacagacccccccaactccccaaagcggggaggagatatttattttggggagagtttggaggggagggagaatttattaataaaagaatctttaacttt

SEQ ID NO: 178 - protein, 129 aa, Homo sapiens
MARGSLRRLLRLLVLGLWLALLRSVAGEQAPGTAPCSRGSSWSADLDKCMDCASCRARPHSDFCLGCAAAPPAPFRLLWPILGGALSLTFVLGLLSGFLVWRRCRRREKFTTPIEETGGEGCPAVALIQ

SEQ ID NO: 179-180 - skipped (2 entries)

SEQ ID NO: 181 - DNA, 20 bp, Artificial Sequence
  5' Primer used in the screening of cDNA encoding the protein capable of activating NF-K B
cttctgctctaaaagctgcg

SEQ ID NO: 182 - DNA, 20 bp, Artificial Sequence
  3' Primer used in the screening of cDNA encoding the protein capable of activating NF-K B
cgacctgcagctcgagcaca

1. A purified protein selected from the group consisting of:
(a) a protein which consists of an amino acid sequence represented by any one of SEQ ID NOS: 1, 3, 5, 7, 9, 11, 13, 15, 17, 19, 21, 23, 25, 27, 29, 31, 33, 35, 37, 39, 41, 43, 45, 47, 49, 51, 53, 55, 57, 59, 61, 63, 65, 67, 69, 71, 73, 75, 77, 79, 81, 83, 85, 87, 89, 91, 93, 95, 97, 99, 101, 103, 105, 107, 109, 111, 113, 115, 117, 119, 121, 123, 125, 127, 129, 131, 133, 135, 137, 139, 141, 143, 145, 147, 149, 152, 154, 156, 158, 160, 162, 164, 166, 168, 170, 172, 174, 176, 178 and 180; and
(b) a protein that activates NF-κB (Nuclear factor kappa B) and consists of an amino acid sequence having at least one amino acid deletion, substitution or addition in an amino acid sequence represented by any one of SEQ ID NOS: 1, 3, 5, 7, 9, 11, 13, 15, 17, 19, 21, 23, 25, 27, 29, 31, 33, 35, 37, 39, 41, 43, 45, 47, 49, 51, 53, 55, 57, 59, 61, 63, 65, 67, 69, 71, 73, 75, 77, 79, 81, 83, 85, 87, 89, 91, 93, 95, 97, 99, 101, 103, 105, 107, 109, 111, 113, 115, 117, 119, 121, 123, 125, 127, 129, 131, 133, 135, 137, 139, 141, 143, 145, 147, 149, 152, 154, 156, 158, 160, 162, 164, 166, 168, 170, 172, 174, 176, 178 and 180:

2. A purified protein that activates NF-κB and comprises an amino acid sequence having at least 95% identity to the protein according to claim 1 over the entire length thereof.

3. An isolated polynucleotide which comprises a nucleotide sequence encoding a protein selected from the group consisting of:
(a) a protein which comprises an amino acid sequence represented by any one of SEQ ID NOS: 1, 3, 5, 7, 9, 11, 13, 15, 17, 19, 21, 23, 25, 27, 29, 31, 33, 35, 37, 39, 41, 43, 45, 47, 49, 51, 53, 55, 57, 59, 61, 63, 65, 67, 69, 71, 73, 75, 77, 79, 81, 83, 85, 87, 89,91, 93, 95, 97, 99, 101, 103, 105, 107, 109, 111, 113, 115, 117, 119, 121, 123, 125, 127, 129, 131, 133, 135, 137, 139, 141, 143, 145, 147, 149, 152, 154, 156, 158, 160, 162, 164, 166, 168, 170, 172, 174, 176, 178 and 180; and
(b) a protein that activates NF-κB and consists of an amino acid sequence having at least one amino acid deletion, substitution or addition in an amino acid sequence represented by any one of SEQ ID NOS: 1, 3, 5, 7, 9, 11, 13, 15, 17, 19, 21, 23, 25, 27, 29, 31, 33, 35, 37, 39, 41, 43, 45, 47, 49, 51, 53, 55, 57, 59, 61, 63, 65, 67, 69, 71, 73, 75, 77, 79, 81, 83, 85, 87, 89, 91, 93, 95, 97, 99, 101, 103, 105, 107, 109, 111, 113, 115, 117, 119, 121, 123, 125, 127, 129, 131, 133, 135, 137, 139, 141, 143, 145, 147, 149, 152, 154, 156, 158, 160, 162, 164, 166, 168, 170, 172, 174, 176, 178 and 180.

4. An isolated polynucleotide comprising a polynucleotide sequence selected from the group consisting of:
(a) a polynucleotide sequence represented by any one of SEQ ID NOS: 2, 4, 6, 8, 10, 12, 14, 16, 18, 20, 22, 24, 26, 28, 30, 32, 34, 36, 38, 40, 42, 44, 46, 48, 50, 52, 54, 56, 58, 60, 62, 64, 66, 68, 70, 72, 74, 76, 78, 80, 82, 84, 86, 88, 90, 92, 94, 96, 98, 100, 102, 104, 106, 108, 110, 112, 114, 116, 118, 120, 122, 124, 126, 128, 130, 132, 134, 136, 138, 140, 142, 144, 146, 148, 150, 151, 153, 155, 157, 159, 161, 163, 165, 167, 169, 171, 173, 175, 177 and 179;
(b) a polynucleotide sequence encoding a protein that activates NF-κB and hybridizing under stringent conditions with a polynucleotide having a polynucleotide sequence complementary to the polynucleotide sequence of (a); and
(c) a polynucleotide sequence which encodes a protein that activates NF-κB and consists of a polynucleotide sequence having at least one nucleotide deletion, substitution or addition in a polynucleotide sequence represented by any one of SEQ ID NOS: 2, 4, 6, 8, 10, 12, 14, 16, 18, 20, 22, 24, 26, 28, 30, 32, 34, 36, 38, 40, 42, 44, 46, 48, 50, 52, 54, 56, 58, 60, 62, 64, 66, 68, 70, 72, 74, 76, 78, 80, 82, 84, 86, 88, 90, 92, 94, 96, 98, 100, 102, 104, 106, 108, 110, 112, 114, 116, 118, 120, 122, 124, 126, 128, 130, 132, 134, 136, 138, 140, 142, 144, 146, 148, 150, 151, 153, 155, 157, 159, 161, 163, 165, 167, 169, 171, 173, 175, 177 and 179.

5. An isolated polynucleotide comprising a nucleotide sequence which encodes a protein that activates NF-κB and has at least 95% identity to the polynucleotide sequence according to claim 3 over the entire length thereof.

6. An isolated polynucleotide comprising a nucleotide sequence which encodes a protein that activates NF-κB and has at least 95% identity to the polynucleotide sequence according to claim 4 over the entire length thereof.

7. A purified protein encoded by the polynucleotide according to any one of claims 3 to 6.

8. A recombinant vector which comprises a polynucleotide according to any one of claims 3 to 6.

9. A transformed cell which comprises the recombinant vector according to claim 8.

10. A membrane of the cell according to claim 9, when the protein according to claim 1 or 2 is a membrane protein.

11. A process for producing a protein comprising,
(a) culturing a transformed cell comprising the isolated polynucleotide according to any one of claims 3 to 6 under conditions providing expression of the encoded protein; and
(b) recovering the protein from the culture product.

12. A process for diagnosing a disease or susceptibility to a disease related to expression or activity of the protein of claim 1, 2 or 7 in a subject comprising:
(a) determining the presence or absence of a mutation in the nucleotide sequence encoding said protein in the genome of said subject; and/or
(b) analyzing the amount of expression of said protein in a sample derived from said subject.

13. A method for screening compounds in respect of activity to inhibit or promote NF-κB activation, which comprises the steps of:
(a) providing a cell with a gene encoding a protein that activates NF-κB, and a component that provides a detectable signal associated with activation of NF-κB;
(b) culturing a transformed cell under conditions, which permit the expression of the gene in the transformed cell;
(c) contacting the transformed cell with one or more compounds;
(d) measuring the detectable signal; and
(e) isolating or identifying an activator compound and/or an inhibitor compound by measuring the detectable signal.

14. A process for producing a pharmaceutical composition, which comprises the steps of:
(a) providing a cell with a gene encoding a protein that activates NF-κB, and a component capable of providing a detectable signal;
(b) culturing a transformed cell under conditions, which permit the expression of the gene in the transformed cell;
(c) contacting the transformed cell with one or more compounds;
(d) measuring the detectable signal;
(e) isolating or identifying an activator compound and/or an inhibitor compound by measuring the detectable signal; and
(f) optimizing the isolated or identified compound as a pharmaceutical composition.

15. A kit for screening a compound in respect of activity to inhibit or promote NF-κB activation, which comprises:
(a) a cell comprising a gene encoding a protein that activates NF-κB, and a component that provides a detectable signal upon activation of NF-κB; and
(b) reagents for measuring the detectable signal.

16. A monoclonal or polyclonal antibody that specifically binds to the protein according to claim 1, 2 or 7.

17. A process for producing a monoclonal or polyclonal antibody that specifically binds to the protein according to claim 1, 2 or 7, which comprises administering the protein according to claim 1, 2 or 7 or epitope-bearing fragments thereof to a non-human animal.

18. An antisense oligonucleotide complementary to the polynucleotide according to any one of claims 3 to 6, which prevents NF-κB activator protein expression.

19. A ribozyme which inhibits NF-κB activation by cleavage of RNA that encodes the protein according to claim 1, 2 or 7.

20. A method for treating a disease, which comprises administering to a subject an amount of a compound screened by the process according to claim 13, and/or a monoclonal or polyclonal antibody according to claim 16, and/or an antisense oligonucleotide according to claim 18 and/or a ribozyme according to claim 19 effective to treat a disease selected from the group consisting of inflammation, autoimmune diseases, infectious disease, cancers and bone diseases.

21. A pharmaceutical composition produced by the process according to claim 14 as an inhibitor or promoter of NF-κB activation.

22. A pharmaceutical composition according to claim 21 for the treatment of inflammation, autoimmune diseases, cancers, infectious diseases, bone diseases, AIDS, neurodegenerative diseases or ischemic disorders.

23. A method of treating inflammation, autoimmune diseases, cancers, infectious diseases, bone diseases, AIDS, neurodegenerative diseases, or ischemic disorders, which comprises administering a pharmaceutical composition produced by the process according to claim 14 to a patient suffering from a disease associated with NF-κB activation.

24. A pharmaceutical composition which comprises a monoclonal or polyclonal antibody according to claim 16 as an active ingredient.

25. A pharmaceutical composition which comprises an antisense oligonucleotide according to claim 18 as an active ingredient.

26. The pharmaceutical composition according to claim 24 or 25, wherein the target disease is selected from the group consisting of inflammation, autoimmune diseases, infectious diseases, cancers, bone diseases, AIDS, neurodegenerative and ischemic disorders.

27. A method for obtaining a novel gene having a function, which comprises at least the following steps:
(a) constructing a full-length cDNA library by the oligo-capping method;
(b) cotransfecting the full-length cDNA and a plasmid containing a factor emitting a signal indicative of the presence of a protein having the function into cells; and
(c) selecting a plasmid emitting the signal.

28. A computer-readable medium on which a sequence data set has been stored, said sequence data set comprising at least one nucleotide sequence selected from the group consisting of SEQ ID NOS: 2, 4, 6, 8, 10, 12, 14, 16, 18, 20, 22, 24, 26, 28, 30, 32, 34, 36, 38, 40, 42, 44, 46, 48, 50, 52, 54, 56, 58, 60, 62, 64, 66, 68, 70, 72, 74, 76, 78, 80, 82, 84, 86, 88, 90, 92, 94, 96, 98, 100, 102, 104, 106, 108, 110, 112, 114, 116, 118, 120, 122, 124, 126, 128, 130, 132, 134, 136, 138, 140, 142, 144, 146, 148, 150, 151, 153, 155, 157, 159, 161, 163, 165, 167, 169, 171, 173, 175, 177 and 179, and/or at least one amino acid sequence selected from the group consisting of SEQ ID NOS: 1, 3, 5, 7, 9, 11, 13, 15, 17, 19, 21, 23, 25, 27, 29, 31, 33, 35, 37, 39, 41, 43, 45, 47, 49, 51, 53, 55, 57, 59, 61, 63, 65, 67, 69, 71, 73, 75, 77, 79, 81, 83, 85, 87, 89, 91, 93, 95, 97, 99, 101, 103, 105, 107, 109, 111, 113, 115, 117, 119, 121, 123, 125, 127, 129, 131, 133, 135, 137, 139, 141, 143, 145, 147, 149, 152, 154, 156, 158, 160, 162, 164, 166, 168, 170, 172, 174, 176, 178 and 180.

29. A method for calculating identity to other nucleotide sequences and/or amino acid sequences, which comprises comparing data on a medium according to claim 28 with data of said other nucleotide sequences and/or amino acid sequences.

30. An insoluble substrate to which polynucleotides comprising all or part of the nucleotide sequences selected from the group consisting of SEQ ID NOS: 2, 4, 6, 8, 10, 12, 14, 16, 18, 20, 22, 24, 26, 28, 30, 32, 34, 36, 38, 40, 42, 44, 46, 48, 50, 52, 54, 56, 58, 60, 62, 64, 66, 68, 70, 72, 74, 76, 78, 80, 82, 84, 86, 88, 90, 92, 94, 96, 98, 100, 102, 104, 106, 108, 110, 112, 114, 116, 118, 120, 122, 124, 126, 128, 130, 132, 134, 136, 138, 140, 142, 144, 146, 148, 150, 151, 153, 155, 157, 159, 161, 163, 165, 167, 169, 171, 173, 175, 177 and 179, are fixed.

31. An insoluble substrate to which polypeptides comprising all or a part of the amino acid sequences selected from the group consisting of SEQ ID NOS: 1, 3, 5, 7, 9, 11, 13, 15, 17, 19, 21, 23, 25, 27, 29, 31, 33, 35, 37, 39, 41, 43, 45, 47, 49, 51, 53, 55, 57, 59, 61, 63, 65, 67, 69, 71, 73, 75, 77, 79, 81, 83, 85, 87, 89, 91, 93, 95, 97, 99, 101, 103, 105, 107, 109, 111, 113, 115, 117, 119, 121, 123, 125, 127, 129, 131, 133, 135, 137, 139, 141, 143, 145, 147, 149, 152, 154, 156, 158, 160, 162, 164, 166, 168, 170, 172, 174, 176, 178 and 180, are fixed.
